(19) United States
(12) Patent Application Publication
(10) Pub. No.: US 2020/0385714 A1
(43) Pub. Date: Dec. 10, 2020

(54) OLIGONUCLEOTIDES FOR MODULATING FNDC3B EXPRESSION

(71) Applicant: Roche Innovation Center Copenhagen A/S, Horsholm (DK)

(72) Inventors: Peter HAGEDORN, Hørsholm (DK); Lykke PEDERSEN, Copenhagen (DK)

(73) Assignee: Roche Innovation Center Copenhagen A/S, Horsholm (DK)

(21) Appl. No.: 15/733,226

(22) PCT Filed: Dec. 10, 2018
(86) PCT No.: PCT/EP2018/084075

§ 371 Date: Jun. 11, 2020

(30) Foreign Application Priority Data
Dec. 11, 2017 (EP) 17206545.0

(51) Int. Cl. C12N 15/113; A61K 47/54

(52) U.S. Cl. CPC C12N 15/113; A61K 47/549; C12N 2310/322; C12N 2310/3231; C12N 2310/3341; C12N 2310/351; C12N 2310/11; C12N 2310/341; C12N 2310/315

(57) ABSTRACT

The present invention relates to antisense oligonucleotides that are capable of modulating expression of FNDC3B in a target cell. The oligonucleotides hybridize to FNDC3B pre-mRNA or mRNA. The present invention further relates to conjugates of the oligonucleotide and pharmaceutical compositions and methods for treatment of cancers, such as hepatocellular carcinoma or acute myeloid leukemia using the oligonucleotide.

### FIELD OF INVENTION

[0001] The present invention relates to antisense oligonucleotides (oligomers) that are complementary to a mammalian FNDC3B (fibronectin type III domain containing 3B or FAD104) transcript and their use in therapy. Such oligonucleotides may be used for reducing FNDC3B transcript in a cell, leading to modulation of the expression of FNDC3B. Modulation of FNDC3B expression is beneficial for a range of medical disorders, such as cancers, such as hepatocellular carcinoma and/or acute myeloid leukemia.

### BACKGROUND

[0002] Cai C et al., Cell Cycle. 2012 May 1; 11(9):1773-81 discloses that FNDC3B amplification and over-expression is an oncogenic driver, and is required for the maintenance of tumorigenic phenotype, in particular in hepatocellular carcinoma. The article refers to shRNA mediated inhibition of FNDC3B.

[0003] RNA interference mediated inhibition of FNDC3B is mentioned in Chin-Hui Lin, Oncotarget. 2016 Aug. 2; 7(31): 49498-49508 by short hairpin RNA. No shRNA or siRNA compounds appear to be disclosed.

[0004] WO2010110346 discloses a therapeutic agent for AML (acute myeloid leukemia) targeting leukemic stem cells, comprising, as an active ingredient a substance which is capable of inhibiting the expression of a gene selected from leukemic marker genes (such as FNDC3B) or a substance which is capable of inhibiting the activity of the translation product of said gene. No specific siRNA compounds appear to be disclosed.

[0005] Antisense oligonucleotides targeting repeated sites in the same RNA have been shown to have enhanced potency for downregulation of target mRNA in some cases of in vitro transfection experiments. This has been the case for GCGR, STST3, MAPT, OGFR, and BOK RNA (Vickers at al. PLOS one, October 2014, Volume 9, Issue 10). WO 2013/120003 also refers to modulation of RNA by repeat targeting.

### Objective of the Invention

[0006] FNDC3B is involved in the development and progression of a number of cancers. The present invention provides antisense oligonucleotides capable of modulating FNDC3B mRNA and protein expression, in vivo or in vitro. Accordingly, the present invention can potentially be used in a combination therapy together with the known cancer care and potentially can alleviate symptoms of cancers, in particular, such cancers as acute myeloid leukemia and/or hepatocellular carcinoma.

### SUMMARY OF INVENTION

[0007] The present invention provides oligonucleotides, which are complementary to and target mammalian FNDC3B nucleic acids, and uses thereof.

[0008] The present invention provides oligonucleotides which comprise a contiguous nucleotide sequence which is complementary to certain regions or sequences present in target mammalian FNDC3B nucleic acids.

[0009] The oligonucleotides of the invention are capable of inhibiting mammalian FNDC3B nucleic acids in a cell which is expressing the mammalian FNDC3B nucleic acid.

[0010] The present invention provides for an antisense oligonucleotide targeting a mammalian FNDC3B nucleic acid, and in vitro and in vivo uses thereof, and their use in medicine.

[0011] The present invention relates to oligonucleotides targeting a FNDC3B nucleic acid and their use to treat or prevent diseases or alleviate symptoms of the disease related to the functioning of the FNDC3B.

[0012] Accordingly, in a first aspect the invention provides an antisense oligonucleotide of 10 to 50 nucleotides in length, which comprises a contiguous nucleotide sequence of 10 to 30 nucleotides in length with at least 90% complementarity, such as fully complementary, to a mammalian FNDC3B nucleic acid, wherein the antisense oligonucleotide is capable of reducing the expression of the mammalian FNDC3B encoding target nucleic acid, in a cell.

[0013] Accordingly, in a further aspect the invention provides the antisense oligonucleotide wherein the contiguous nucleotide sequence is at least 90% complementary, such as fully complementary, to a sequence selected from the group consisting of SEQ ID NO 1, 2, 3, 4, 5, 6, 7 and 8, or a naturally occurring variant thereof.

[0014] Accordingly, in a further apect, the invention provides an antisense oligonucleotide of 10 to 30 nucleotides in length, which comprises a contiguous nucleotide sequence of 10 to 30 nucleotides in length which is fully complementary to a human FNDC3B target nucleic acid, such as SEQ ID NO 1, wherein the antisense oligonucleotide is capable of reducing the expression of human FNDC3B in a cell.

[0015] In a further aspect the invention provides the antisense oligonucleotide, wherein the contiguous nucleotide sequence is at least 90% complementary, such as fully complementary, to more than one region of SEQ ID NO 1.

[0016] In a further aspect the invention provides the antisense oligonucleotide, wherein the contiguous nucleotide sequence is at least 90% complementary, such as fully complementary, to a region of SEQ ID NO 1, selected from the group consisting of position 54366-54385, 54407-54426, 54448-54467, 54489-54508, 54530-54549, 54571-54590, 54612-54631; 54367-54384, 54408-54425, 54449-54466, 54490-54507, 54531-54548, 54572-54589, 54613-54630; 54368-54383, 54409-54424, 54450-54465, 54491-54506, 54532-54547, 54573-54588, 54614-54629; 54366-54379, 54407-54420, 54448-54461, 54489-54502, 54530-54543, 54571-54584, 54612-54625; 351016-351033; 351016-351029; 351016-351035; 351018-35133 of SEQ ID NO: 1.

[0017] In a further aspect the invention provides the antisense oligonucleotide, wherein the antisense oligonucleotide, or contiguous nucleotide sequence thereof is selected from the group consisting of GaatttgctagtggtggtGG (Compound ID 11_1); GCTagtggtggtGG (Compound ID 12_1); AATttgctagtggtgGTG (Compound ID 13_1); ATTTgctagtggtgGT (Compound ID 14_1); TTatttctacagtttccAGA (Compound ID 15_1); ATTTctacagtttccAGA (Compound ID 16_1); CTacagtttcCAGA (Compound ID 17_1); and ATTTctacagtttCCA (Compound ID 18_1); wherein capital letters represent LNA nucleosides, such as beta-D-oxy LNA nucleosides, lower case letters represent DNA nucleosides, optionally all LNA C are 5-methyl cytosine, wherein the compounds comprise phosphorothioate internucleoside linkages.

[0018] In a further aspect the invention provides the antisense oligonucleotide, wherein the antisense oligonucleotide, or contiguous nucleotide sequence thereof is selected from the group consisting of GaatttgctagtggtggtGG (Compound ID 11_1); GCTagtggtggtGG (Compound ID 12_1); AATttgctagtggtgGTG (Compound ID 13_1); ATTTgctagtggtgGT (Compound ID 14_1); TTatttctacagtttccAGA (Compound ID 15_1); ATTTctacagtttccAGA (Compound ID 16_1); CTacagtttcCAGA (Compound ID 17_1); and ATTTctacagtttCCA (Compound ID 18_1); wherein capital letters represent beta-D-oxy LNA nucleosides, lower case letters represent DNA nucleosides, all LNA C are 5-methyl cytosine, and all internucleoside linkages are phosphorothioate internucleoside linkages.

[0019] In a further aspect the invention provides a conjugate comprising the antisense oligonucleotide according to the invention, and at least one conjugate moiety covalently attached to said oligonucleotide.

[0020] In a further aspect the invention provides a pharmaceutical composition comprising the oligonucleotide according to the invention or the conjugate according to the invention, and a pharmaceutically acceptable diluent, solvent, carrier, salt and/or adjuvant.

[0021] In a further aspect, the invention provides a pharmaceutically acceptable salt of the antisense oligonucleotide or conjugate according to the invention the invention.

[0022] In a further aspect the invention provides a method, such as an in vivo or in vitro method, for inhibiting a mammalian FNDC3B expression in a target cell which is expressing the mammalian FNDC3B, said method comprising administering an oligonucleotide, the conjugate, the pharmaceutically acceptable salt, or the pharmaceutical composition according to the invention in an effective amount to said cell.

[0023] In a further aspect the invention provides a method for treating or preventing a disease comprising administering a therapeutically or prophylactically effective amount of an oligonucleotide, the conjugate, the pharmaceutically acceptable salt, or the pharmaceutical composition according to the invention to a subject suffering from or susceptible to the disease.

[0024] In a further aspect the invention provides a use of the oligonucleotide, the conjugate, the pharmaceutically acceptable salt, or the pharmaceutical composition for the preparation of a medicament for treatment or prevention of cancer, such as hepatocellular carcinoma or acute myeloid leukemia.

### Definitions

[0025] Oligonucleotide

[0026] The term “oligonucleotide” as used herein is defined as it is generally understood by the skilled person as a molecule comprising two or more covalently linked nucleosides. Such covalently bound nucleosides may also be referred to as nucleic acid molecules or oligomers. Oligonucleotides are commonly made in the laboratory by solid-phase chemical synthesis followed by purification. When referring to a sequence of the oligonucleotide, reference is made to the sequence or order of nucleobase moieties, or modifications thereof, of the covalently linked nucleotides or nucleosides. The oligonucleotide of the invention is man-made, and is chemically synthesized, and is typically purified or isolated. The oligonucleotide of the invention may comprise one or more modified nucleosides or nucleotides.

[0027] Antisense Oligonucleotides

[0028] The term “Antisense oligonucleotide” as used herein is defined as oligonucleotides capable of modulating expression of a target gene by hybridizing to a target nucleic acid, in particular to a contiguous sequence on a target nucleic acid, in a cell which is expressing the target nucleic acid. The antisense oligonucleotides are not essentially double stranded and are therefore not siRNAs or shRNAs. Preferably, the antisense oligonucleotides of the present invention are single stranded. It is understood that single stranded oligonucleotides of the present invention can form hairpins or intermolecular duplex structures (duplex between two molecules of the same oligonucleotide), as long as the degree of intra or inter self complementarity is less than 50% across of the full length of the oligonucleotide. The antisense oligonucleotide of the invention is man-made, and is chemically synthesized, and is typically purified or isolated. The antisense oligonucleotide of the invention may comprise one or more modified nucleosides or nucleotides.

[0029] Contiguous Nucleotide Sequence

[0030] The term “contiguous nucleotide sequence” refers to the region of the oligonucleotide which is complementary to the target nucleic acid. The term is used interchangeably herein with the term “contiguous nucleobase sequence” and the term “oligonucleotide motif sequence”. In some embodiments all the nucleotides of the oligonucleotide constitute the contiguous nucleotide sequence. In some embodiments the oligonucleotide comprises the contiguous nucleotide sequence, such as a F-G-F′ gapmer region, and may optionally comprise further nucleotide(s), for example a nucleotide linker region which may be used to attach a functional group to the contiguous nucleotide sequence. The nucleotide linker region may or may not be complementary to the target nucleic acid.

[0031] Nucleotides Nucleotides are the building blocks of oligonucleotides and polynucleotides, and for the purposes of the present invention include both naturally occurring and non-naturally occurring nucleotides. In nature, nucleotides, such as DNA and RNA nucleotides comprise a ribose sugar moiety, a nucleobase moiety and one or more phosphate groups (which is absent in nucleosides). Nucleosides and nucleotides may also interchangeably be referred to as “units” or “monomers”.

[0032] Modified Nucleoside

[0033] The term “modified nucleoside” or “nucleoside modification” as used herein refers to nucleosides modified as compared to the equivalent DNA or RNA nucleoside by the introduction of one or more modifications of the sugar moiety or the (nucleo)base moiety. In a preferred embodiment the modified nucleoside comprise a modified sugar moiety. The term modified nucleoside may also be used herein interchangeably with the term “nucleoside analogue” or modified “units” or modified “monomers”. Nucleosides with an unmodified DNA or RNA sugar moiety are termed DNA or RNA nucleosides herein. Nucleosides with modifications in the base region of the DNA or RNA nucleoside are still generally termed DNA or RNA if they allow Watson Crick base pairing.

[0034] Modified Internucleoside Linkage

[0035] The term “modified internucleoside linkage” is defined as generally understood by the skilled person as linkages other than phosphodiester (PO) linkages, that covalently couples two nucleosides together. The oligonucleotides of the invention may therefore comprise modified internucleoside linkages. In some embodiments, the modified internucleoside linkage increases the nuclease resistance of the oligonucleotide compared to a phosphodiester linkage. For naturally occurring oligonucleotides, the internucleoside linkage includes phosphate groups creating a phosphodiester bond between adjacent nucleosides. Modified internucleoside linkages are particularly useful in stabilizing oligonucleotides for in vivo use, and may serve to protect against nuclease cleavage at regions of DNA or RNA nucleosides in the oligonucleotide of the invention, for example within the gap region of a gapmer oligonucleotide, as well as in regions of modified nucleosides, such as region F and F′.

[0036] In an embodiment, the oligonucleotide comprises one or more internucleoside linkages modified from the natural phosphodiester, such one or more modified internucleoside linkages that is for example more resistant to nuclease attack. Nuclease resistance may be determined by incubating the oligonucleotide in blood serum or by using a nuclease resistance assay (e.g. snake venom phosphodiesterase (SVPD)), both are well known in the art. Internucleoside linkages which are capable of enhancing the nuclease resistance of an oligonucleotide are referred to as nuclease resistant internucleoside linkages. In some embodiments at least 50% of the internucleoside linkages in the oligonucleotide, or contiguous nucleotide sequence thereof, are modified, such as at least 60%, such as at least 70%, such as at least 75% such as at least 80% or such as at least 90% of the internucleoside linkages in the oligonucleotide, or contiguous nucleotide sequence thereof, are nuclease resistant internucleoside linkages. In some embodiments all of the internucleoside linkages of the oligonucleotide, or contiguous nucleotide sequence thereof, are nuclease resistant internucleoside linkages. It will be recognized that, in some embodiments the nucleosides which link the oligonucleotide of the invention to a non-nucleotide functional group, such as a conjugate, may be phosphodiester.

[0037] A preferred modified internucleoside linkage for use in the oligonucleotide of the invention is phosphorothioate.

[0038] Phosphorothioate internucleoside linkages are particularly useful due to nuclease resistance, beneficial pharmacokinetics and ease of manufacture. In some embodiments at least 50% of the internucleoside linkages in the oligonucleotide, or contiguous nucleotide sequence thereof, are phosphorothioate, such as at least 60%, such as at least 70%, such as at least 75%, such as at least 80% or such as at least 90% of the internucleoside linkages in the oligonucleotide, or contiguous nucleotide sequence thereof, are phosphorothioate. In some embodiments, all of the internucleoside linkages of the oligonucleotide, or contiguous nucleotide sequence thereof, are phosphorothioate. In some embodiments, the oligonucleotide of the invention comprises both phosphorothioate internucleoside linkages and at least one phosphodiester linkage, such as 2, 3 or 4 phosphodiester linkages, in addition to the phosphorodithioate linkage(s). In a gapmer oligonucleotide, phosphodiester linkages, when present, are suitably not located between contiguous DNA nucleosides in the gap region G.

[0039] Nuclease resistant linkages, such as phosphorothioate linkages, are particularly useful in oligonucleotide regions capable of recruiting nuclease when forming a duplex with the target nucleic acid, such as region G for gapmers. Phosphorothioate linkages may, however, also be useful in non-nuclease recruiting regions and/or affinity enhancing regions such as regions F and F′ for gapmers. Gapmer oligonucleotides may, in some embodiments comprise one or more phosphodiester linkages in region F or F′, or both region F and F′, where all the internucleoside linkages in region G may be phosphorothioate.

[0040] Advantageously, all the internucleoside linkages in the contiguous nucleotide sequence of the oligonucleotide, or all the internucleoside linkages of the oligonucleotide, are phosphorothioate linkages.

[0041] It is recognized that, as disclosed in EP 2 742 135, antisense oligonucleotides may comprise other internucleoside linkages (other than phosphodiester and phosphorothioate), for example alkyl phosphonate/methyl phosphonate internucleosides, which according to EP 2 742 135 may for example be tolerated in an otherwise DNA phosphorothioate the gap region.

[0042] Nucleobase

[0043] The term nucleobase includes the purine (e.g. adenine and guanine) and pyrimidine (e.g. uracil, thymine and cytosine) moiety present in nucleosides and nucleotides which form hydrogen bonds in nucleic acid hybridization. In the context of the present invention the term nucleobase also encompasses modified nucleobases which may differ from naturally occurring nucleobases, but are functional during nucleic acid hybridization. In this context “nucleobase” refers to both naturally occurring nucleobases such as adenine, guanine, cytosine, thymidine, uracil, xanthine and hypoxanthine, as well as non-naturally occurring variants. Such variants are for example described in Hirao et al (2012) Accounts of Chemical Research vol 45 page 2055 and Bergstrom (2009) Current Protocols in Nucleic Acid Chemistry Suppl. 37 1.4.1.

[0044] In a some embodiments the nucleobase moiety is modified by changing the purine or pyrimidine into a modified purine or pyrimidine, such as substituted purine or substituted pyrimidine, such as a nucleobased selected from isocytosine, pseudoisocytosine, 5-methyl cytosine, 5-thiozolo-cytosine, 5-propynyl-cytosine, 5-propynyl-uracil, 5-bromouracil 5-thiazolo-uracil, 2-thio-uracil, 2′thio-thymine, inosine, diaminopurine, 6-aminopurine, 2-aminopurine, 2,6-diaminopurine and 2-chloro-6-aminopurine.

[0045] The nucleobase moieties may be indicated by the letter code for each corresponding nucleobase, e.g. A, T, G, C or U, wherein each letter may optionally include modified nucleobases of equivalent function. For example, in the exemplified oligonucleotides, the nucleobase moieties are selected from A, T, G, C, and 5-methyl cytosine. Optionally, for LNA gapmers, 5-methyl cytosine LNA nucleosides may be used.

[0046] Modified Oligonucleotide

[0047] The term modified oligonucleotide describes an oligonucleotide comprising one or more sugar-modified nucleosides and/or modified internucleoside linkages. The term chimeric” oligonucleotide is a term that has been used in the literature to describe oligonucleotides with modified nucleosides.

[0048] Complementarity

[0049] The term “complementarity” describes the capacity for Watson-Crick base-pairing of nucleosides/nucleotides. Watson-Crick base pairs are guanine (G)-cytosine (C) and adenine (A)-thymine (T)/uracil (U). It will be understood that oligonucleotides may comprise nucleosides with modified nucleobases, for example 5-methyl cytosine is often used in place of cytosine, and as such the term complementarity encompasses Watson Crick base-paring between non-modified and modified nucleobases (see for example Hirao et al (2012) Accounts of Chemical Research vol 45 page 2055 and Bergstrom (2009) Current Protocols in Nucleic Acid Chemistry Suppl. 37 1.4.1).

[0050] The term “% complementary” as used herein, refers to the proportion of nucleotides (in percent) of a contiguous nucleotide sequence in a nucleic acid molecule (e.g. oligonucleotide) which across the contiguous nucleotide sequence, are complementary to a reference sequence (e.g. a target sequence or sequence motif). The percentage of complementarity is thus calculated by counting the number of aligned nucleobases that are complementary (from Watson Crick base pair) between the two sequences (when aligned with the target sequence 5′-3′ and the oligonucleotide sequence from 3′-5′), dividing that number by the total number of nucleotides in the oligonucleotide and multiplying by 100. In such a comparison a nucleobase/nucleotide which does not align (form a base pair) is termed a mismatch. Insertions and deletions are not allowed in the calculation of % complementarity of a contiguous nucleotide sequence. It will be understood that in determining complementarity, chemical modifications of the nucleobases are disregarded as long as the functional capacity of the nucleobase to form Watson Crick base pairing is retained (e.g. 5′-methyl cytosine is considered identical to a cytosine for the purpose of calculating % identity).

[0051] The term “fully complementary”, refers to 100% complementarity.

[0052] The following is an example of an oligonucleotide according to the invention that is fully complementary to the target nucleic acid.

[0053] The following is an example of an oligonucleotide (SEQ ID NO: 15) that is fully complementary to the target nucleic acid (SEQ ID NO: 6).

(SEQ ID NO: 6)
5′ CAACATGCTCGGCCTGTTACACACACACACACACAC 3′
(SEQ ID NO: 15)
3′ CGAGCCGGACAATGTGTGTG 5′

[0054] Identity

[0055] The term “Identity” as used herein, refers to the proportion of nucleotides (expressed in percent) of a contiguous nucleotide sequence in a nucleic acid molecule (e.g. oligonucleotide) which across the contiguous nucleotide sequence, are identical to a reference sequence (e.g. a sequence motif). The percentage of identity is thus calculated by counting the number of aligned bases that are identical (a match) between two sequences (in the contiguous nucleotide sequence of the compound of the invention and in the reference sequence), dividing that number by the total number of nucleotides in the oligonucleotide and multiplying by 100. Therefore, Percentage of Identity=(Matches×100)/Length of aligned region (e.g. the contiguous nucleotide sequence). Insertions and deletions are not allowed in the calculation the percentage of identity of a contiguous nucleotide sequence. It will be understood that in determining identity, chemical modifications of the nucleobases are disregarded as long as the functional capacity of the nucleobase to form Watson Crick base pairing is retained (e.g. 5-methyl cytosine is considered identical to a cytosine for the purpose of calculating % identity).

[0056] Hybridization

[0057] The term “hybridizing” or “hybridizes” as used herein is to be understood as two nucleic acid strands (e.g. an oligonucleotide and a target nucleic acid) forming hydrogen bonds between base pairs on opposite strands thereby forming a duplex. The affinity of the binding between two nucleic acid strands is the strength of the hybridization. It is often described in terms of the melting temperature (Tₘ) defined as the temperature at which half of the oligonucleotides are duplexed with the target nucleic acid. At physiological conditions Tₘ is not strictly proportional to the affinity (Mergny and Lacroix, 2003, Oligonucleotides 13:515-537). The standard state Gibbs free energy ΔG° is a more accurate representation of binding affinity and is related to the dissociation constant (K_{d}) of the reaction by ΔG°=−RTIn(K_{d}), where R is the gas constant and T is the absolute temperature. Therefore, a very low ΔG° of the reaction between an oligonucleotide and the target nucleic acid reflects a strong hybridization between the oligonucleotide and target nucleic acid. ΔG° is the energy associated with a reaction where aqueous concentrations are 1M, the pH is 7, and the temperature is 37° C. The hybridization of oligonucleotides to a target nucleic acid is a spontaneous reaction and for spontaneous reactions ΔG° is less than zero. ΔG° can be measured experimentally, for example, by use of the isothermal titration calorimetry (ITC) method as described in Hansen et al., 1965, Chem. Comm. 36-38 and Holdgate et al., 2005, Drug Discov Today. The skilled person will know that commercial equipment is available for ΔG° measurements. ΔG° can also be estimated numerically by using the nearest neighbor model as described by SantaLucia, 1998, Proc Natl Acad Sci USA. 95: 1460-1465 using appropriately derived thermodynamic parameters described by Sugimoto et al., 1995, Biochemistry 34:11211-11216 and McTigue et al., 2004, Biochemistry 43:5388-5405. In order to have the possibility of modulating its intended nucleic acid target by hybridization, oligonucleotides of the present invention hybridize to a target nucleic acid with estimated ΔG° values below −10 kcal for oligonucleotides that are 10-30 nucleotides in length. In some embodiments the degree or strength of hybridization is measured by the standard state Gibbs free energy ΔG°. The oligonucleotides may hybridize to a target nucleic acid with estimated ΔG° values below the range of −10 kcal, such as below −15 kcal, such as below −20 kcal and such as below −25 kcal for oligonucleotides that are 8-30 nucleotides in length. In some embodiments the oligonucleotides hybridize to a target nucleic acid with an estimated ΔG° value of −10 to −60 kcal, such as −12 to −40, such as from −15 to −30 kcal or −16 to −27 kcal such as −18 to −25 kcal.

[0058] Target Nucleic Acid

[0059] According to the present invention, the target nucleic acid is a nucleic acid which encodes mammalian FNDC3B and may for example be a gene, a RNA, a mRNA, and pre-mRNA, a mature mRNA or a cDNA sequence. The target may therefore be referred to as an FNDC3B target nucleic acid. The oligonucleotide of the invention may for example target exon regions of a mammalian FNDC3B, or may, for example target any intron region in the FNDC3B pre-mRNA (see, for example, Table 1).

TABLE 1
Human FNDC3B Exons and Introns of one of the splice variants.

| | |
|---|---|
| Exonic regions in the | Intronic regions in the |
| human FNDC3B | human FNDC3B |
| premRNA (SEQ ID | premRNA (SEQ ID |
| NO1) | NO 1) |

| ID | start | end | ID | start | end |
|---|---|---|---|---|---|
| e1 | 1 | 144 | i1 | 145 | 72824 |
| e2 | 72825 | 72963 | i2 | 72964 | 93844 |
| e3 | 93844 | 93919 | i3 | 93920 | 147084 |
| e4 | 147085 | 147671 | | | |

[0060] Suitably, the target nucleic acid encodes an FNDC3B protein, in particular mammalian FNDC3B, such as human FNDC3B (See for example tables 2 and 3) which provides the mRNA and pre-mRNA sequences for human, monkey, mice and rat FNDC3B).

[0061] In some embodiments, the target nucleic acid is selected from the group consisting of SEQ ID NO: 1, 2, 3, 4, 5, 6, 7 and 8 or naturally occurring variants thereof (e.g. sequences encoding a mammalian FNDC3B protein.

[0062] The target nucleic acid may, in some embodiments, be a RNA or DNA, such as messenger RNA, such as a mature mRNA or a pre-mRNA which encodes mammalian FNDC3B protein, such as human FNDC3B, e.g. the human pre-mRNA sequence, such as that disclosed as SEQ ID NO:1 or human mature mRNA as disclosed in SEQ ID NO:2, SEQ ID NO:3, SEQ ID NO:4, SEQ ID NO:5, SEQ ID NO:6 and SEQ ID NO:7 or naturally occurring variants thereof (e.g. sequences encoding a mammalian FNDC3B protein).

[0063] If employing the oligonucleotide of the invention in research or diagnostics the target nucleic acid may be a cDNA or a synthetic nucleic acid derived from DNA or RNA.

[0064] For in vivo or in vitro application, the oligonucleotide of the invention is typically capable of inhibiting the expression of the FNDC3B target nucleic acid in a cell which is expressing the FNDC3B target nucleic acid. The contiguous sequence of nucleobases of the antisense oligonucleotide of the invention is typically complementary to the FNDC3B target nucleic acid, as measured across the length of the antisense oligonucleotide, optionally with the exception of one or two mismatches, and optionally excluding nucleotide based linker regions which may link the oligonucleotide to an optional functional group such as a conjugate, or other non-complementary terminal nucleotides (e.g. region D′ or D″). The target nucleic acid may, in some embodiments, be a RNA or DNA, such as a messenger RNA, such as a mature mRNA or a pre-mRNA. In some embodiments the target nucleic acid is a RNA or DNA which encodes mammalian FNDC3B protein, such as human FNDC3B, e.g. the human FNDC3B pre-mRNA sequence, such as that disclosed as SEQ ID NO 1. Further information on exemplary target nucleic acids is provided in tables 2 and 3.

TABLE 2
Genome and assembly information for FNDC3B across species.

| | | | Genomic coordinates | | | |
|---|---|---|---|---|---|---|
| Species | Chr. | Strand | Start | End | Assembly | Ensemble ID |
| Human | 3 | fwd | 172039628 | 172401665 | GRCh38.p2 release 107 | ENSG00000075420 |
| Mus | 3 | rev | 27416162 | 27711307 | GRCm38.p5 | ENSMUSG00000039286 |
| musculus | | | | | | |
| Cynomolgus | 2 | fwd | 76257179 | 76622494 | Macaca_{—}fascicularis_5.0 | |
| monkey | | | | | release 100 (GCF_000364345) | |
| Rat | 2 | rev | 113112902 | 113345577 | Rnor_6.0 | ENSRNOG00000024089 |
| norvegics | | | | | release 105 | |

Fwd = forward strand. The genome coordinates provide the pre-mRNA sequence (genomic sequence). The NCBI reference provides the mRNA sequence (cDNA sequence).

TABLE 3
Sequence details for FNDC3B across species.

| | | Length | SEQ ID |
|---|---|---|---|
| Species | RNA type | (nt) | NO |
| Human | Pre- | 362038 | 1 |
| | mRNA | | |
| Human | mRNA | 7904 | 2 |
| Human | mRNA | 408 | 3 |
| Human | mRNA | 678 | 4 |
| Human | mRNA | 3684 | 5 |
| Human | mRNA | 5083 | 6 |
| Human | mRNA | 946 | 7 |
| Cynomonkey | Pre- | 365316 | 8* |
| | mRNA | | |

[0065] Note SEQ ID NO 8 comprises regions of multiple NNNNs, where the sequencing has been unable to accurately refine the sequence, and a degenerate sequence is therefore included. For the avoidance of doubt the compounds of the invention are complementary to the actual cynomonkey target sequence and are not therefore degenerate compounds.

[0066] Target Sequence

[0067] The term “target sequence” as used herein refers to a sequence of nucleotides present in the target nucleic acid which comprises the nucleobase sequence which is complementary to the antisense oligonucleotide of the invention. In some embodiments, the target sequence consists of a region on the target nucleic acid with a nucleobase sequence that is complementary to the contiguous nucleotide sequence of the antisense oligonucleotide of the invention. This region of the target nucleic acid may interchangeably be referred to as the target nucleotide sequence, target sequence or target region. In some embodiments the target sequence is longer than the contiguous complementary sequence of a single oligonucleotide, and may, for example represent a preferred region of the target nucleic acid which may be targeted by several oligonucleotides of the invention.

[0068] The antisense oligonucleotide of the invention comprises a contiguous nucleotide sequence which is complementary to the target nucleic acid such as a target sequence described herein.

[0069] The target sequence to which the oligonucleotide is complementary generally comprises a contiguous nucleobase sequence of at least 10 nucleotides. The contiguous nucleotide sequence is between 10 to 50 nucleotides, such as 12 to 30, such as 14 to 20, such as 15 to 18 contiguous nucleotides

[0070] In one embodiment of the invention the target sequence is SEQ ID NO: 9.

[0071] In another embodiment of the invention the target sequence is SEQ ID NO: 10.

[0072] In another embodiment of the invention the target sequence is SEQ ID NO: 19.

[0073] In another embodiment of the invention the target sequence is SEQ ID NO: 20.

[0074] Repeated Target Region

[0075] The target region or target sequence can be unique for the target nucleic acid (only present once).

[0076] In some aspects of the invention the target region is repeated at least two times over the span of target nucleic acid. Repeated as encompassed by the present invention means that there are at least two identical nucleotide sequences (target regions) of at least 10, such as at least 11, or at least 12, nucleotides in length which occur in the target nucleic acid at different positions. Each repeated target region is separated from the identical region by at least one nucleobase on the contiguous sequence of target nucleic acid and is positioned at different and non-overlapping positions within the target nucleic acid.

[0077] Target Cell

[0078] The term “target cell” as used herein refers to a cell which is expressing the target nucleic acid. In some embodiments the target cell may be in vivo or in vitro. In some embodiments the target cell is a mammalian cell such as a rodent cell, such as a mouse cell or a rat cell, or a primate cell such as a monkey cell or a human cell.

[0079] In preferred embodiments the target cell expresses FNDC3B mRNA, such as the FNDC3B pre-mRNA or FNDC3B mature mRNA. The poly A tail of FNDC3B mRNA is disregarded for antisense oligonucleotide targeting.

[0080] Naturally Occurring Variant

[0081] The term “naturally occurring variant” refers to variants of FNDC3B gene or transcripts which originate from the same genetic loci as the target nucleic acid and is a directional transcript from the same chromosomal position and direction as the target nucleic acid, but may differ for example, by virtue of degeneracy of the genetic code causing a multiplicity of codons encoding the same amino acid, or due to alternative splicing of pre-mRNA, or the presence of polymorphisms, such as single nucleotide polymorphisms, and allelic variants. Based on the presence of the sufficient complementary sequence to the oligonucleotide, the oligonucleotide of the invention may therefore target the target nucleic acid and naturally occurring variants thereof.

[0082] In some embodiments, the naturally occurring variants have at least 95% such as at least 98% or at least 99% homology to a mammalian FNDC3B target nucleic acid, such as a target nucleic acid selected form the group consisting of SEQ ID NO 1, 2, 3, 4, 5, 6, 7 or 8.

[0083] Modulation of Expression

[0084] The term “modulation of expression” as used herein is to be understood as an overall term for an oligonucleotide's ability to alter the amount of FNDC3B when compared to the amount of FNDC3B before administration of the oligonucleotide. Alternatively modulation of expression may be determined by reference to a control experiment. It is generally understood that the control is a target cell treated with a saline composition or a target cell treated with a non-targeting oligonucleotide (mock).

[0085] A modulation according to the present invention shall be understood as an antisense oligonucleotide's ability to inhibit, down-regulate, reduce, suppress, remove, stop, block, prevent, lessen, lower, avoid or terminate expression of FNDC3B, e.g. by degradation of mRNA or blockage of transcription.

[0086] High Affinity Modified Nucleosides

[0087] A high affinity modified nucleoside is a modified nucleotide which, when incorporated into the oligonucleotide enhances the affinity of the oligonucleotide for its complementary target, for example as measured by the melting temperature (T^{m}). A high affinity modified nucleoside of the present invention preferably result in an increase in melting temperature between +0.5 to +12° C., more preferably between +1.5 to +10° C. and most preferably between +3 to +8° C. per modified nucleoside. Numerous high affinity modified nucleosides are known in the art and include for example, many 2′ substituted nucleosides as well as locked nucleic acids (LNA) (see e.g. Freier & Altmann; Nucl. Acid Res., 1997, 25, 4429-4443 and Uhlmann; Curr. Opinion in Drug Development, 2000, 3(2), 293-213).

[0088] Sugar Modifications

[0089] The oligomer of the invention may comprise one or more nucleosides which have a modified sugar moiety, i.e. a modification of the sugar moiety when compared to the ribose sugar moiety found in DNA and RNA.

[0090] Numerous nucleosides with modification of the ribose sugar moiety have been made, primarily with the aim of improving certain properties of oligonucleotides, such as affinity and/or nuclease resistance.

[0091] Such modifications include those where the ribose ring structure is modified, e.g. by replacement with a hexose ring (HNA), or a bicyclic ring, which typically have a biradicle bridge between the C2 and C4 carbons on the ribose ring (LNA), or an unlinked ribose ring which typically lacks a bond between the C2 and C3 carbons (e.g. UNA). Other sugar modified nucleosides include, for example, bicyclohexose nucleic acids (WO2011/017521) or tricyclic nucleic acids (WO2013/154798). Modified nucleosides also include nucleosides where the sugar moiety is replaced with a non-sugar moiety, for example in the case of peptide nucleic acids (PNA), or morpholino nucleic acids.

[0092] 2′ Modified Nucleosides.

[0093] A 2′ sugar modified nucleoside is a nucleoside which has a substituent other than H or —OH at the 2′ position (2′ substituted nucleoside) or comprises a 2′ linked biradicle capable of forming a bridge between the 2′ carbon and a second carbon in the ribose ring, such as LNA (2′-4′ biradicle bridged) nucleosides.

[0094] Indeed, much focus has been spent on developing 2′ substituted nucleosides, and numerous 2′ substituted nucleosides have been found to have beneficial properties when incorporated into oligonucleotides. For example, the 2′ modified sugar may provide enhanced binding affinity and/or increased nuclease resistance to the oligonucleotide. Examples of 2′ substituted modified nucleosides are 2′-O-alkyl-RNA, 2′-O-methyl-RNA, 2′-alkoxy-RNA, 2′-O-methoxyethyl-RNA (MOE), 2′-amino-DNA, 2′-Fluoro-RNA, and 2′-F-ANA nucleoside. For further examples, please see e.g. Freier & Altmann; Nucl. Acid Res., 1997, 25, 4429-4443 and Uhlmann; Curr. Opinion in Drug Development, 2000, 3(2), 293-213, and Deleavey and Damha, Chemistry and Biology 2012, 19, 937. Below are illustrations of some 2′ substituted modified nucleosides.

[chemical structure]

[0095] In relation to the present invention 2′ substituted sugar modified nucleosides does not include 2′ bridged nucleosides like LNA.

[0096] Locked Nucleic Acid Nucleosides (LNA).

[0097] A “LNA nucleoside” is a 2′-modified nucleoside which comprises a biradical linking the C2′ and C4′ of the ribose sugar ring of said nucleoside (also referred to as a “2′-4′ bridge”), which restricts or locks the conformation of the ribose ring. These nucleosides are also termed bridged nucleic acid or bicyclic nucleic acid (BNA) in the literature. The locking of the conformation of the ribose is associated with an enhanced affinity of hybridization (duplex stabilization) when the LNA is incorporated into an oligonucleotide for a complementary RNA or DNA molecule. This can be routinely determined by measuring the melting temperature of the oligonucleotide/complement duplex.

[0098] Non limiting, exemplary LNA nucleosides are disclosed in WO 99/014226, WO 00/66604, WO 98/039352, WO 2004/046160, WO 00/047599, WO 2007/134181, WO 2010/077578, WO 2010/036698, WO 2007/090071, WO 2009/006478, WO 2011/156202, WO 2008/154401, WO 2009/067647, WO 2008/150729, Morita et al., Bioorganic & Med. Chem. Lett. 12, 73-76, Seth et al. J. Org. Chem. 2010, Vol 75(5) pp. 1569-81 and Mitsuoka et al., Nucleic Acids Research 2009, 37(4), 1225-1238.

[0099] The 2′-4′ bridge comprises 2 to 4 bridging atoms and is in particular of formula —X—Y—, X being linked to C4′ and Y linked to C2′,

[0100] wherein
[0101] X is oxygen, sulfur, —CR^{a}R^{b}—, —C(R^{a})═C(R^{b})—, —C(═CR^{a}R^{b})—, —C(R^{a})═N—, —Si(R^{a})₂—, —SO₂—, —NR^{a}—; —O—NR^{a}—, —NR^{a}—O—, —C(=J)-, Se, —O—NR^{a}—, —NR^{a}—CR^{a}R^{b}—, —N(R^{a})—O— or —O—CR^{a}R^{b}—
[0102] Y is oxygen, sulfur, —(CR^{a}R^{b})ₙ—, —CR^{a}R^{b}—O—CR^{a}R^{b}—, —C(R^{a})═C(R^{b})—, —C(R^{a})═N—, —Si(R^{a})₂—, —SO₂—, —NIR^{a}—, —C(=J)-, Se, —O—NR^{a}—, —NR^{a}—CR^{a}R^{b}—, —N(R^{a})—O— or —O—CR^{a}R^{b}—;
[0103] with the proviso that —X—Y— is not —O—O—, Si(R^{a})₂—Si(R^{a})₂—, —SO₂—SO₂—, —C(R^{a})═C(R^{b})—C(R^{a})═C(R^{b}), —C(R^{a})═N—C(R^{a})═N—, —C(R^{a})═N—C(R^{a})═C(R^{b}), —C(R^{a})═C(R^{b})—C(R^{a})═N— or —Se—Se—;
[0104] J is oxygen, sulfur, ═CH₂ or ═N(R^{a});
[0105] R^{a} and R^{b} are independently selected from hydrogen, halogen, hydroxyl, cyano, thiohydroxyl, alkyl, substituted alkyl, alkenyl, substituted alkenyl, alkynyl, substituted alkynyl, alkoxy, substituted alkoxy, alkoxyalkyl, alkenyloxy, carboxyl, alkoxycarbonyl, alkylcarbonyl, formyl, aryl, heterocyclyl, amino, alkylamino, carbamoyl, alkylaminocarbonyl, aminoalkylaminocarbonyl, alkylaminoalkylaminocarbonyl, alkylcarbonylamino, carbamido, alkanoyloxy, sulfonyl, alkylsulfonyloxy, nitro, azido, thiohydroxylsulfidealkylsulfanyl, aryloxycarbonyl, aryloxy, arylcarbonyl, heteroaryl, heteroaryloxycarbonyl, heteroaryloxy, heteroarylcarbonyl, —OC(═X^{a})R^{c}, —OC(═X^{a})NR^{c}R^{d} and —NR^{e}C(═X^{a})NR^{c}R^{d};
[0106] or two geminal R^{a} and R^{b} together form optionally substituted methylene;
[0107] or two geminal R^{a} and R^{b}, together with the carbon atom to which they are attached, form cycloalkyl or halocycloalkyl, with only one carbon atom of —X—Y—;
[0108] wherein substituted alkyl, substituted alkenyl, substituted alkynyl, substituted alkoxy and substituted methylene are alkyl, alkenyl, alkynyl and methylene substituted with 1 to 3 substituents independently selected from halogen, hydroxyl, alkyl, alkenyl, alkynyl, alkoxy, alkoxyalkyl, alkenyloxy, carboxyl, alkoxycarbonyl, alkylcarbonyl, formyl, heterocyclyl, aryl and heteroaryl;
[0109] X^{a} is oxygen, sulfur or —NR^{c};
[0110] R^{c}, R^{d} and Re are independently selected from hydrogen and alkyl; and
[0111] n is 1, 2 or 3.

[0112] In a further particular embodiment of the invention, X is oxygen, sulfur, —NR^{a}—, —CR^{a}R^{b}— or —C(═CR^{a}R^{b})—, particularly oxygen, sulfur, —NH—, —CH₂— or —C(═CH₂)—, more particularly oxygen.

[0113] In another particular embodiment of the invention, Y is —CR^{a}R^{b}—, —CR^{a}R^{b}—CR^{a}R^{b}— or —CR^{a}R^{b}—CR^{a}R^{b}—CR^{a}R^{b}—, particularly —CH₂—CHCH₃—, —CHCH₃—CH₂—, —CH₂—CH₂— or —CH₂—CH₂—CH₂-.

[0114] In a particular embodiment of the invention, —X—Y— is —O—(CR^{a}R^{b})ₙ—, —S—CR^{a}R^{b}—, —N(R^{a})CR^{a}R^{b}—, —CR^{a}R^{b}—CR^{a}R^{b}—, —O—CR^{a}R^{b}—O—CR^{a}R^{b}—, —CR^{a}R^{b}—O—CR^{a}R^{b}—, —C(═CR^{a}R^{b})—CR^{a}R^{b}—, —N(R^{a})CR^{a}R^{b}—, —O—N(R^{a})—CR^{a}R^{b}— or —N(R^{a})—O—CR^{a}R^{b}—.

[0115] In a particular embodiment of the invention, R^{a} and R^{b} are independently selected from the group consisting of hydrogen, halogen, hydroxyl, alkyl and alkoxyalkyl, in particular hydrogen, halogen, alkyl and alkoxyalkyl.

[0116] In another embodiment of the invention, R^{a} and R^{b} are independently selected from the group consisting of hydrogen, fluoro, hydroxyl, methyl and —CH₂—O—CH₃, in particular hydrogen, fluoro, methyl and —CH₂—O—CH₃.

[0117] Advantageously, one of R^{a} and R^{b} of —X—Y— is as defined above and the other ones are all hydrogen at the same time.

[0118] In a further particular embodiment of the invention, R^{a} is hydrogen or alkyl, in particular hydrogen or methyl.

[0119] In another particular embodiment of the invention, R^{b} is hydrogen or or alkyl, in particular hydrogen or methyl.

[0120] In a particular embodiment of the invention, one or both of R^{a} and R^{b} are hydrogen.

[0121] In a particular embodiment of the invention, only one of R^{a} and R^{b} is hydrogen.

[0122] In one particular embodiment of the invention, one of R^{a} and R^{b} is methyl and the other one is hydrogen.

[0123] In a particular embodiment of the invention, R^{a} and R^{b} are both methyl at the same time.

[0124] In a particular embodiment of the invention, —X—Y— is —O—CH₂—, —S—CH₂—, —S—CH(CH₃)—, —NH—CH₂—, —O—CH₂CH₂—, —O—CH(CH₂—O—CH₃)—, —O—CH(CH₂CH₃)—, —O—CH(CH₃)—, —O—CH₂—O—CH₂—, —O—CH₂—O—CH₂—, —CH₂—O—CH₂—, —C(═CH₂)CH₂—, —C(═CH₂)CH(CH₃)—, —N(OCH₃)CH₂- or —N(CH₃)CH₂—;

[0125] In a particular embodiment of the invention, —X—Y— is —O—CR^{a}R^{b}— wherein R^{a} and R^{b} are independently selected from the group consisting of hydrogen, alkyl and alkoxyalkyl, in particular hydrogen, methyl and —CH₂—O—CH₃.

[0126] In a particular embodiment, —X—Y— is —O—CH₂— or —O—CH(CH₃)—, particularly —O—CH₂-.

[0127] The 2′-4′ bridge may be positioned either below the plane of the ribose ring (beta-D-configuration), or above the plane of the ring (alpha-L-configuration), as illustrated in formula (A) and formula (B) respectively.

[0128] The LNA nucleoside according to the invention is in particular of formula (A) or (B)

[chemical structure]

[0129] wherein
[0130] W is oxygen, sulfur, —N(R^{a})— or —CR^{a}R^{b}—, in particular oxygen;
[0131] B is a nucleobase or a modified nucleobase;
[0132] Z is an internucleoside linkage to an adjacent nucleoside or a 5′-terminal group;
[0133] Z* is an internucleoside linkage to an adjacent nucleoside or a 3′-terminal group;
[0134] R¹, R², R³, R⁵ and R^{5*} are independently selected from hydrogen, halogen, alkyl, haloalkyl, alkenyl, alkynyl, hydroxy, alkoxy, alkoxyalkyl, azido, alkenyloxy, carboxyl, alkoxycarbonyl, alkylcarbonyl, formyl and aryl; and
[0135] X, Y, R^{a} and R^{b} are as defined above.

[0136] In a particular embodiment, in the definition of —X—Y—, R^{a} is hydrogen or alkyl, in particular hydrogen or methyl. In another particular embodiment, in the definition of —X—Y—, R^{b} is hydrogen or alkyl, in particular hydrogen or methyl. In a further particular embodiment, in the definition of —X—Y—, one or both of R^{a} and R^{b} are hydrogen. In a particular embodiment, in the definition of —X—Y—, only one of R^{a} and R^{b} is hydrogen. In one particular embodiment, in the definition of —X—Y—, one of R^{a} and R^{b} is methyl and the other one is hydrogen. In a particular embodiment, in the definition of —X—Y—, R^{a} and R^{b} are both methyl at the same time.

[0137] In a further particular embodiment, in the definition of X, R^{a} is hydrogen or alkyl, in particular hydrogen or methyl. In another particular embodiment, in the definition of X, R^{b} is hydrogen or alkyl, in particular hydrogen or methyl. In a particular embodiment, in the definition of X, one or both of R^{a} and R^{b} are hydrogen. In a particular embodiment, in the definition of X, only one of R^{a} and R^{b} is hydrogen. In one particular embodiment, in the definition of X, one of R^{a} and R^{b} is methyl and the other one is hydrogen. In a particular embodiment, in the definition of X, R^{a} and R^{b} are both methyl at the same time.

[0138] In a further particular embodiment, in the definition of Y, R^{a} is hydrogen or alkyl, in particular hydrogen or methyl. In another particular embodiment, in the definition of Y, R^{b} is hydrogen or alkyl, in particular hydrogen or methyl. In a particular embodiment, in the definition of Y, one or both of R^{a} and R^{b} are hydrogen. In a particular embodiment, in the definition of Y, only one of R^{a} and R^{b} is hydrogen. In one particular embodiment, in the definition of Y, one of R^{a} and R^{b} is methyl and the other one is hydrogen. In a particular embodiment, in the definition of Y, R^{a} and R^{b} are both methyl at the same time.

[0139] In a particular embodiment of the invention R¹, R², R³, R⁵ and R^{5*} are independently selected from hydrogen and alkyl, in particular hydrogen and methyl.

[0140] In a further particular advantageous embodiment of the invention, R¹, R², R³, R⁵ and R^{5*} are all hydrogen at the same time.

[0141] In another particular embodiment of the invention, R¹, R², R³, are all hydrogen at the same time, one of R⁵ and R^{5*} is hydrogen and the other one is as defined above, in particular alkyl, more particularly methyl.

[0142] In a particular embodiment of the invention, R⁵ and R^{5*} are independently selected from hydrogen, halogen, alkyl, alkoxyalkyl and azido, in particular from hydrogen, fluoro, methyl, methoxyethyl and azido. In particular advantageous embodiments of the invention, one of R⁵ and R^{5*} is hydrogen and the other one is alkyl, in particular methyl, halogen, in particular fluoro, alkoxyalkyl, in particular methoxyethyl or azido; or R⁵ and R^{5*} are both hydrogen or halogen at the same time, in particular both hydrogen of fluoro at the same time. In such particular embodiments, W can advantageously be oxygen, and —X—Y— advantageously —O—CH₂-.

[0143] In a particular embodiment of the invention, —X—Y— is —O—CH₂—, W is oxygen and R¹, R², R³, R⁵ and R^{5*} are all hydrogen at the same time. Such LNA nucleosides are disclosed in WO 99/014226, WO 00/66604, WO 98/039352 and WO 2004/046160 which are all hereby incorporated by reference, and include what are commonly known in the art as beta-D-oxy LNA and alpha-L-oxy LNA nucleosides.

[0144] In another particular embodiment of the invention, —X—Y— is —S—CH₂—, W is oxygen and R¹, R², R³, R⁵ and R^{5*} are all hydrogen at the same time. Such thio LNA nucleosides are disclosed in WO 99/014226 and WO 2004/046160 which are hereby incorporated by reference.

[0145] In another particular embodiment of the invention, —X—Y— is —NH—CH₂—, W is oxygen and R¹, R², R³, R⁵ and R^{5*} are all hydrogen at the same time. Such amino LNA nucleosides are disclosed in WO 99/014226 and WO 2004/046160 which are hereby incorporated by reference.

[0146] In another particular embodiment of the invention, —X—Y— is —O—CH₂CH₂- or —OCH₂CH₂CH₂—, W is oxygen, and R¹, R², R³, R⁵ and R^{5*} are all hydrogen at the same time. Such LNA nucleosides are disclosed in WO 00/047599 and Morita et al., Bioorganic & Med. Chem. Lett. 12, 73-76, which are hereby incorporated by reference, and include what are commonly known in the art as 2′-O-4′C-ethylene bridged nucleic acids (ENA).

[0147] In another particular embodiment of the invention, —X—Y— is —O—CH₂—, W is oxygen, R¹, R², R³ are all hydrogen at the same time, one of R⁵ and R^{5*} is hydrogen and the other one is not hydrogen, such as alkyl, for example methyl. Such 5′ substituted LNA nucleosides are disclosed in WO 2007/134181 which is hereby incorporated by reference.

[0148] In another particular embodiment of the invention, —X—Y— is —O—CR^{a}R^{b}—, wherein one or both of R^{a} and R^{b} are not hydrogen, in particular alkyl such as methyl, W is oxygen, R¹, R², R³ are all hydrogen at the same time, one of R⁵ and R^{5*} is hydrogen and the other one is not hydrogen, in particular alkyl, for example methyl. Such bis modified LNA nucleosides are disclosed in WO 2010/077578 which is hereby incorporated by reference.

[0149] In another particular embodiment of the invention, —X—Y— is —O—CHR^{a}—, W is oxygen and R¹, R², R³, R⁵ and R^{5*} are all hydrogen at the same time. Such 6′-substituted LNA nucleosides are disclosed in WO 2010/036698 and WO 2007/090071 which are both hereby incorporated by reference. In such 6′-substituted LNA nucleosides, R^{a} is in particular C₁-C₆ alkyl, such as methyl.

[0150] In another particular embodiment of the invention, —X—Y— is —O—CH(CH₂—O—CH₃)— (“2′O-methoxyethyl bicyclic nucleic acid”, Seth et al. J. Org. Chem. 2010, Vol 75(5) pp. 1569-81).

[0151] In another particular embodiment of the invention, —X—Y— is —O—CH(CH₂CH₃)— (“2′O-ethyl bicyclic nucleic acid”, Seth at al., J. Org. Chem. 2010, Vol 75(5) pp. 1569-81).

[0152] In another particular embodiment of the invention, —X—Y— is —O—CH(CH₂—O—CH₃)—, W is oxygen and R¹, R², R³, R⁵ and R^{5*} are all hydrogen at the same time. Such LNA nucleosides are also known in the art as cyclic MOEs (cMOE) and are disclosed in WO 2007/090071.

[0153] In another particular embodiment of the invention, —X—Y— is —O—CH(CH₃)—.

[0154] In another particular embodiment of the invention, —X—Y— is —O—CH₂—O—CH₂— (Seth et al., J. Org. Chem 2010 op. cit.)

[0155] In another particular embodiment of the invention, —X—Y— is —O—CH(CH₃)—, W is oxygen and R¹, R², R³, R⁵ and R^{5*} are all hydrogen at the same time. Such 6′-methyl LNA nucleosides are also known in the art as cET nucleosides, and may be either (S)-cET or (R)-cET diastereoisomers, as disclosed in WO 2007/090071 (beta-D) and WO 2010/036698 (alpha-L) which are both hereby incorporated by reference.

[0156] In another particular embodiment of the invention, —X—Y— is —O—CR^{a}R^{b}—, wherein neither R^{a} nor R^{b} is hydrogen, W is oxygen and R¹, R², R³, R⁵ and R^{5*} are all hydrogen at the same time. In a particular embodiment, R^{a} and R^{b} are both alkyl at the same time, in particular both methyl at the same time. Such 6′-di-substituted LNA nucleosides are disclosed in WO 2009/006478 which is hereby incorporated by reference.

[0157] In another particular embodiment of the invention, —X—Y— is —S—CHIR^{a}—, W is oxygen and R¹, R², R³, R⁵ and R^{5*} are all hydrogen at the same time. Such 6′-substituted thio LNA nucleosides are disclosed in WO 2011/156202 which is hereby incorporated by reference. In a particular embodiment of such 6′-substituted thio LNA, R^{a} is alkyl, in particular methyl.

[0158] In a particular embodiment of the invention, —X—Y— is —C(═CH₂)C(R^{a}R^{b})—, —C(═CHF)C(R^{a}R^{b})— or —C(═CF₂)C(R^{a}R^{b})—, W is oxygen and R¹, R², R³, R⁵ and R^{5*} are all hydrogen at the same time. R^{a} and R^{b} are advantageously independently selected from hydrogen, halogen, alkyl and alkoxyalkyl, in particular hydrogen, methyl, fluoro and methoxymethyl. R^{a} and R^{b} are in particular both hydrogen or methyl at the same time or one of R^{a} and R^{b} is hydrogen and the other one is methyl. Such vinyl carbo LNA nucleosides are disclosed in WO 2008/154401 and WO 2009/067647 which are both hereby incorporated by reference.

[0159] In a particular embodiment of the invention, —X—Y— is-N(OR^{a})—CH₂—, W is oxygen and R¹, R², R³, R⁵ and R^{5*} are all hydrogen at the same time. In a particular embodiment, R^{a} is alkyl such as methyl. Such LNA nucleosides are also known as N substituted LNAs and are disclosed in WO 2008/150729 which is hereby incorporated by reference.

[0160] In a particular embodiment of the invention, —X—Y— is —O—N(R^{a})—, —N(R^{a})—O—, —NR^{a}—CR^{a}R^{b}—CR^{a}R^{b}— or —NR^{a}—CR^{a}R^{b}—, W is oxygen and R¹, R², R³, R⁵ and R^{5*} are all hydrogen at the same time. R^{a} and R^{b} are advantageously independently selected from hydrogen, halogen, alkyl and alkoxyalkyl, in particular hydrogen, methyl, fluoro and methoxymethyl. In a particular embodiment, R^{a} is alkyl, such as methyl, R^{b} is hydrogen or methyl, in particular hydrogen. (Seth et al., J. Org. Chem 2010 op. cit.).

[0161] In a particular embodiment of the invention, —X—Y— is —O—N(CH₃)— (Seth et al., J. Org. Chem 2010 op. cit.).

[0162] In a particular embodiment of the invention, R⁵ and R^{5*} are both hydrogen at the same time. In another particular embodiment of the invention, one of R⁵ and R^{5*} is hydrogen and the other one is alkyl, such as methyl. In such embodiments, R¹, R² and R³ can be in particular hydrogen and —X—Y— can be in particular —O—CH₂— or —O—CHC(R^{a})₃—, such as —O—CH(CH₃)—.

[0163] In a particular embodiment of the invention, —X—Y— is —CR^{a}R^{b}—O—CR^{a}R^{b}—, such as —CH₂—O—CH₂—, W is oxygen and R¹, R², R³, R⁵ and R^{5*} are all hydrogen at the same time. In such particular embodiments, R^{a} can be in particular alkyl such as methyl, R^{b} hydrogen or methyl, in particular hydrogen. Such LNA nucleosides are also known as conformationally restricted nucleotides (CRNs) and are disclosed in WO 2013/036868 which is hereby incorporated by reference.

[0164] In a particular embodiment of the invention, —X—Y— is-O—CR^{a}R^{b}—O—CR^{a}R^{b}—, such as —O—CH₂—O—CH₂—, W is oxygen and R¹, R², R³, R⁵ and R^{5*} are all hydrogen at the same time. R^{a} and R^{b} are advantageously independently selected from hydrogen, halogen, alkyl and alkoxyalkyl, in particular hydrogen, methyl, fluoro and methoxymethyl. In such a particular embodiment, R^{a} can be in particular alkyl such as methyl, R^{b} hydrogen or methyl, in particular hydrogen. Such LNA nucleosides are also known as COC nucleotides and are disclosed in Mitsuoka et al., Nucleic Acids Research 2009, 37(4), 1225-1238, which is hereby incorporated by reference.

[0165] It will be recognized than, unless specified, the LNA nucleosides may be in the beta-D or alpha-L stereoisoform.

[0166] Particular examples of LNA nucleosides of the invention are presented in Scheme 1 (wherein B is as defined above).

[chemical structure]

### Chemical Group Definitions

[0167] In the present description the term “alkyl”, alone or in combination, signifies a straight-chain or branched-chain alkyl group with 1 to 8 carbon atoms, particularly a straight or branched-chain alkyl group with 1 to 6 carbon atoms and more particularly a straight or branched-chain alkyl group with 1 to 4 carbon atoms. Examples of straight-chain and branched-chain C₁-C₈ alkyl groups are methyl, ethyl, propyl, isopropyl, butyl, isobutyl, tert.-butyl, the isomeric pentyls, the isomeric hexyls, the isomeric heptyls and the isomeric octyls, particularly methyl, ethyl, propyl, butyl and pentyl. Particular examples of alkyl are methyl, ethyl and propyl.

[0168] The term “cycloalkyl”, alone or in combination, signifies a cycloalkyl ring with 3 to 8 carbon atoms and particularly a cycloalkyl ring with 3 to 6 carbon atoms. Examples of cycloalkyl are cyclopropyl, cyclobutyl, cyclopentyl, cyclohexyl, cycloheptyl and cyclooctyl, more particularly cyclopropyl and cyclobutyl. A particular example of “cycloalkyl” is cyclopropyl.

[0169] The term “alkoxy”, alone or in combination, signifies a group of the formula alkyl-O— in which the term “alkyl” has the previously given significance, such as methoxy, ethoxy, n-propoxy, isopropoxy, n-butoxy, isobutoxy, sec.butoxy and tert.butoxy. Particular “alkoxy” are methoxy and ethoxy. Methoxyethoxy is a particular example of “alkoxyalkoxy”.

[0170] The term “oxy”, alone or in combination, signifies the —O— group.

[0171] The term “alkenyl”, alone or in combination, signifies a straight-chain or branched hydrocarbon residue comprising an olefinic bond and up to 8, preferably up to 6, particularly preferred up to 4 carbon atoms. Examples of alkenyl groups are ethenyl, 1-propenyl, 2-propenyl, isopropenyl, 1-butenyl, 2-butenyl, 3-butenyl and isobutenyl.

[0172] The term “alkynyl”, alone or in combination, signifies a straight-chain or branched hydrocarbon residue comprising a triple bond and up to 8, preferably up to 6, particularly preferred up to 4 carbon atoms.

[0173] The terms “halogen” or “halo”, alone or in combination, signifies fluorine, chlorine, bromine or iodine and particularly fluorine, chlorine or bromine, more particularly fluorine. The term “halo”, in combination with another group, denotes the substitution of said group with at least one halogen, particularly substituted with one to five halogens, particularly one to four halogens, i.e. one, two, three or four halogens.

[0174] The term “haloalkyl”, alone or in combination, denotes an alkyl group substituted with at least one halogen, particularly substituted with one to five halogens, particularly one to three halogens. Examples of haloalkyl include monofluoro-, difluoro- or trifluoro-methyl, -ethyl or -propyl, for example 3,3,3-trifluoropropyl, 2-fluoroethyl, 2,2,2-trifluoroethyl, fluoromethyl or trifluoromethyl. Fluoromethyl, difluoromethyl and trifluoromethyl are particular “haloalkyl”.

[0175] The term “halocycloalkyl”, alone or in combination, denotes a cycloalkyl group as defined above substituted with at least one halogen, particularly substituted with one to five halogens, particularly one to three halogens. Particular example of “halocycloalkyl” are halocyclopropyl, in particular fluorocyclopropyl, difluorocyclopropyl and trifluorocyclopropyl.

[0176] The terms “hydroxyl” and “hydroxy”, alone or in combination, signify the —OH group.

[0177] The terms “thiohydroxyl” and “thiohydroxy”, alone or in combination, signify the —SH group.

[0178] The term “carbonyl”, alone or in combination, signifies the —C(O)— group.

[0179] The term “carboxy” or “carboxyl”, alone or in combination, signifies the —COOH group.

[0180] The term “amino”, alone or in combination, signifies the primary amino group (—NH₂), the secondary amino group (—NH—), or the tertiary amino group (—N—).

[0181] The term “alkylamino”, alone or in combination, signifies an amino group as defined above substituted with one or two alkyl groups as defined above.

[0182] The term “sulfonyl”, alone or in combination, means the —SO₂ group.

[0183] The term “sulfinyl”, alone or in combination, signifies the —SO— group.

[0184] The term “sulfanyl”, alone or in combination, signifies the —S— group.

[0185] The term “cyano”, alone or in combination, signifies the —CN group.

[0186] The term “azido”, alone or in combination, signifies the —N₃ group.

[0187] The term “nitro”, alone or in combination, signifies the NO₂ group.

[0188] The term “formyl”, alone or in combination, signifies the —C(O)H group.

[0189] The term “carbamoyl”, alone or in combination, signifies the —C(O)NH₂ group.

[0190] The term “cabamido”, alone or in combination, signifies the —NH—C(O)—NH₂ group.

[0191] The term “aryl”, alone or in combination, denotes a monovalent aromatic carbocyclic mono- or bicyclic ring system comprising 6 to 10 carbon ring atoms, optionally substituted with 1 to 3 substituents independently selected from halogen, hydroxyl, alkyl, alkenyl, alkynyl, alkoxy, alkoxyalkyl, alkenyloxy, carboxyl, alkoxycarbonyl, alkylcarbonyl and formyl. Examples of aryl include phenyl and naphthyl, in particular phenyl.

[0192] The term “heteroaryl”, alone or in combination, denotes a monovalent aromatic heterocyclic mono- or bicyclic ring system of 5 to 12 ring atoms, comprising 1, 2, 3 or 4 heteroatoms selected from N, O and S, the remaining ring atoms being carbon, optionally substituted with 1 to 3 substituents independently selected from halogen, hydroxyl, alkyl, alkenyl, alkynyl, alkoxy, alkoxyalkyl, alkenyloxy, carboxyl, alkoxycarbonyl, alkylcarbonyl and formyl. Examples of heteroaryl include pyrrolyl, furanyl, thienyl, imidazolyl, oxazolyl, thiazolyl, triazolyl, oxadiazolyl, thiadiazolyl, tetrazolyl, pyridinyl, pyrazinyl, pyrazolyl, pyridazinyl, pyrimidinyl, triazinyl, azepinyl, diazepinyl, isoxazolyl, benzofuranyl, isothiazolyl, benzothienyl, indolyl, isoindolyl, isobenzofuranyl, benzimidazolyl, benzoxazolyl, benzoisoxazolyl, benzothiazolyl, benzoisothiazolyl, benzooxadiazolyl, benzothiadiazolyl, benzotriazolyl, purinyl, quinolinyl, isoquinolinyl, quinazolinyl, quinoxalinyl, carbazolyl or acridinyl.

[0193] The term “heterocyclyl”, alone or in combination, signifies a monovalent saturated or partly unsaturated mono- or bicyclic ring system of 4 to 12, in particular 4 to 9 ring atoms, comprising 1, 2, 3 or 4 ring heteroatoms selected from N, O and S, the remaining ring atoms being carbon, optionally substituted with 1 to 3 substituents independently selected from halogen, hydroxyl, alkyl, alkenyl, alkynyl, alkoxy, alkoxyalkyl, alkenyloxy, carboxyl, alkoxycarbonyl, alkylcarbonyl and formyl. Examples for monocyclic saturated heterocyclyl are azetidinyl, pyrrolidinyl, tetrahydrofuranyl, tetrahydro-thienyl, pyrazolidinyl, imidazolidinyl, oxazolidinyl, isoxazolidinyl, thiazolidinyl, piperidinyl, tetrahydropyranyl, tetrahydrothiopyranyl, piperazinyl, morpholinyl, thiomorpholinyl, 1,1-dioxo-thiomorpholin-4-yl, azepanyl, diazepanyl, homopiperazinyl, or oxazepanyl. Examples for bicyclic saturated heterocycloalkyl are 8-aza-bicyclo[3.2.1]octyl, quinuclidinyl, 8-oxa-3-aza-bicyclo[3.2.1]octyl, 9-aza-bicyclo[3.3.1]nonyl, 3-oxa-9-aza-bicyclo[3.3.1]nonyl, or 3-thia-9-aza-bicyclo[3.3.1]nonyl. Examples for partly unsaturated heterocycloalkyl are dihydrofuryl, imidazolinyl, dihydro-oxazolyl, tetrahydro-pyridinyl or dihydropyranyl.

[0194] Pharmaceutically Acceptable Salts

[0195] The term “pharmaceutically acceptable salts” refers to those salts which retain the biological effectiveness and properties of the free bases or free acids, which are not biologically or otherwise undesirable. The salts are formed with inorganic acids such as hydrochloric acid, hydrobromic acid, sulfuric acid, nitric acid, phosphoric acid, particularly hydrochloric acid, and organic acids such as acetic acid, propionic acid, glycolic acid, pyruvic acid, oxalic acid, maleic acid, malonic acid, succinic acid, fumaric acid, tartaric acid, citric acid, benzoic acid, cinnamic acid, mandelic acid, methanesulfonic acid, ethanesulfonic acid, p-toluenesulfonic acid, salicylic acid, N-acetylcystein. In addition these salts may be prepared form addition of an inorganic base or an organic base to the free acid. Salts derived from an inorganic base include, but are not limited to, the sodium, potassium, lithium, ammonium, calcium, magnesium salts. Salts derived from organic bases include, but are not limited to salts of primary, secondary, and tertiary amines, substituted amines including naturally occurring substituted amines, cyclic amines and basic ion exchange resins, such as isopropylamine, trimethylamine, diethylamine, triethylamine, tripropylamine, ethanolamine, lysine, arginine, N-ethylpiperidine, piperidine, polyamine resins. The compound of formula (I) can also be present in the form of zwitterions. Particularly preferred pharmaceutically acceptable salts of compounds of formula (I) are the salts of hydrochloric acid, hydrobromic acid, sulfuric acid, phosphoric acid and methanesulfonic acid.

[0196] Protecting Group

[0197] The term “protecting group”, alone or in combination, signifies a group which selectively blocks a reactive site in a multifunctional compound such that a chemical reaction can be carried out selectively at another unprotected reactive site. Protecting groups can be removed. Exemplary protecting groups are amino-protecting groups, carboxy-protecting groups or hydroxy-protecting groups.

[0198] Nuclease Mediated Degradation

[0199] Nuclease mediated degradation refers to an oligonucleotide capable of mediating degradation of a complementary nucleotide sequence when forming a duplex with such a sequence.

[0200] In some embodiments, the oligonucleotide may function via nuclease mediated degradation of the target nucleic acid, where the oligonucleotides of the invention are capable of recruiting a nuclease, particularly and endonuclease, preferably endoribonuclease (RNase), such as RNase H. Examples of oligonucleotide designs which operate via nuclease mediated mechanisms are oligonucleotides which typically comprise a region of at least 5 or 6 DNA nucleosides and are flanked on one side or both sides by affinity enhancing nucleosides, for example gapmers, headmers and tailmers.

[0201] RNase H Activity and Recruitment

[0202] The RNase H activity of an antisense oligonucleotide refers to its ability to recruit RNase H when in a duplex with a complementary RNA molecule. WO01/23613 provides in vitro methods for determining RNaseH activity, which may be used to determine the ability to recruit RNaseH. Typically an oligonucleotide is deemed capable of recruiting RNase H if it, when provided with a complementary target nucleic acid sequence, has an initial rate, as measured in pmol/l/min, of at least 5%, such as at least 10% or more than 20% of the of the initial rate determined when using a oligonucleotide having the same base sequence as the modified oligonucleotide being tested, but containing only DNA monomers with phosphorothioate linkages between all monomers in the oligonucleotide, and using the methodology provided by Example 91-95 of WO01/23613 (hereby incorporated by reference). For use in determining RHase H activity, recombinant human RNase H1 is available from Lubio Science GmbH, Lucerne, Switzerland.

[0203] Gapmer

[0204] The antisense oligonucleotide of the invention, or contiguous nucleotide sequence thereof may be a gapmer. The antisense gapmers are commonly used to inhibit a target nucleic acid via RNase H mediated degradation. A gapmer oligonucleotide comprises at least three distinct structural regions a 5′-flank, a gap and a 3′-flank, F-G-F′ in the ‘5->3’ orientation. The “gap” region (G) comprises a stretch of contiguous DNA nucleotides which enable the oligonucleotide to recruit RNase H. The gap region is flanked by a 5′ flanking region (F) comprising one or more sugar modified nucleosides, advantageously high affinity sugar modified nucleosides, and by a 3′ flanking region (F′) comprising one or more sugar modified nucleosides, advantageously high affinity sugar modified nucleosides. The one or more sugar modified nucleosides in region F and F′ enhance the affinity of the oligonucleotide for the target nucleic acid (i.e. are affinity enhancing sugar modified nucleosides). In some embodiments, the one or more sugar modified nucleosides in region F and F′ are 2′ sugar modified nucleosides, such as high affinity 2′ sugar modifications, such as independently selected from LNA and 2′-MOE.

[0205] In a gapmer design, the 5′ and 3′ most nucleosides of the gap region are DNA nucleosides, and are positioned adjacent to a sugar modified nucleoside of the 5′ (F) or 3′ (F′) region respectively. The flanks may further defined by having at least one sugar modified nucleoside at the end most distant from the gap region, i.e. at the 5′ end of the 5′ flank and at the 3′ end of the 3′ flank.

[0206] Regions F-G-F′ form a contiguous nucleotide sequence. Antisense oligonucleotides of the invention, or the contiguous nucleotide sequence thereof, may comprise a gapmer region of formula F-G-F′.

[0207] The overall length of the gapmer design F-G-F′ may be, for example 12 to 32 nucleosides, such as 13 to 24, such as 14 to 22 nucleosides, Such as from 14 to 17, such as 16 to 18 nucleosides.

[0208] By way of example, the gapmer oligonucleotide of the present invention can be represented by the following formulae:

F₁₋₈-G₅₋₁₆-F′₁₋₈, such as

F₁₋₈-G₇₋₁₆-F₂₋₈

[0209] with the proviso that the overall length of the gapmer regions F-G-F′ is at least 12, such as at least 14 nucleotides in length.

[0210] Regions F, G and F′ are further defined below and can be incorporated into the F-G-F′ formula.

[0211] Gapmer-Region G

[0212] Region G (gap region) of the gapmer is a region of nucleosides which enables the oligonucleotide to recruit RNaseH, such as human RNase H1, typically DNA nucleosides. RNaseH is a cellular enzyme which recognizes the duplex between DNA and RNA, and enzymatically cleaves the RNA molecule. Suitably gapmers may have a gap region (G) of at least 5 or 6 contiguous DNA nucleosides, such as 5-16 contiguous DNA nucleosides, such as 6-15 contiguous DNA nucleosides, such as 7-14 contiguous DNA nucleosides, such as 8-12 contiguous DNA nucleotides, such as 8-12 contiguous DNA nucleotides in length. The gap region G may, in some embodiments consist of 6, 7, 8, 9, 10, 11, 12, 13, 14, 15 or 16 contiguous DNA nucleosides. Cytosine (C) DNA in the gap region may in some instances be methylated, such residues are either annotated as 5-methyl-cytosine (meC or with an e instead of a c). Methylation of Cytosine DNA in the gap is advantageous if cg dinucleotides are present in the gap to reduce potential toxicity, the modification does not have significant impact on efficacy of the oligonucleotides.

[0213] In some embodiments the gap region G may consist of 6, 7, 8, 9, 10, 11, 12, 13, 14, 15 or 16 contiguous phosphorothioate linked DNA nucleosides. In some embodiments, all internucleoside linkages in the gap are phosphorothioate linkages.

[0214] Whilst traditional gapmers have a DNA gap region, there are numerous examples of modified nucleosides which allow for RNaseH recruitment when they are used within the gap region. Modified nucleosides which have been reported as being capable of recruiting RNaseH when included within a gap region include, for example, alpha-L-LNA, C4′ alkylated DNA (as described in PCT/EP2009/050349 and Vester et al., Bioorg. Med. Chem. Lett. 18 (2008) 2296-2300, both incorporated herein by reference), arabinose derived nucleosides like ANA and 2′F-ANA (Mangos et al. 2003 J. AM. CHEM. SOC. 125, 654-661), UNA (unlocked nucleic acid) (as described in Fluiter et al., Mol. Biosyst., 2009, 10, 1039 incorporated herein by reference). UNA is unlocked nucleic acid, typically where the bond between C2 and C3 of the ribose has been removed, forming an unlocked “sugar” residue. The modified nucleosides used in such gapmers may be nucleosides which adopt a 2′ endo (DNA like) structure when introduced into the gap region, i.e. modifications which allow for RNaseH recruitment). In some embodiments the DNA Gap region (G) described herein may optionally contain 1 to 3 sugar modified nucleosides which adopt a 2′ endo (DNA like) structure when introduced into the gap region.

[0215] Region G-“Gap-Breaker”

[0216] Alternatively, there are numerous reports of the insertion of a modified nucleoside which confers a 3′ endo conformation into the gap region of gapmers, whilst retaining some RNaseH activity. Such gapmers with a gap region comprising one or more 3′endo modified nucleosides are referred to as “gap-breaker” or “gap-disrupted” gapmers, see for example WO2013/022984. Gap-breaker oligonucleotides retain sufficient region of DNA nucleosides within the gap region to allow for RNaseH recruitment. The ability of gapbreaker oligonucleotide design to recruit RNaseH is typically sequence or even compound specific —see Rukov et al. 2015 Nucl. Acids Res. Vol. 43 pp. 8476-8487, which discloses “gapbreaker” oligonucleotides which recruit RNaseH which in some instances provide a more specific cleavage of the target RNA. Modified nucleosides used within the gap region of gap-breaker oligonucleotides may for example be modified nucleosides which confer a 3′endo confirmation, such 2′-O-methyl (OMe) or 2′-O-MOE (MOE) nucleosides, or beta-D LNA nucleosides (the bridge between C2′ and C4′ of the ribose sugar ring of a nucleoside is in the beta conformation), such as beta-D-oxy LNA or ScET nucleosides.

[0217] As with gapmers containing region G described above, the gap region of gap-breaker or gap-disrupted gapmers, have a DNA nucleosides at the 5′ end of the gap (adjacent to the 3′ nucleoside of region F), and a DNA nucleoside at the 3′ end of the gap (adjacent to the 5′ nucleoside of region F′). Gapmers which comprise a disrupted gap typically retain a region of at least 3 or 4 contiguous DNA nucleosides at either the 5′ end or 3′ end of the gap region.

[0218] Exemplary designs for gap-breaker oligonucleotides include

F₁₋₈-[D₃₋₄-E₁-D₃₋₄]-F′₁₋₈

F₁₋₈-[D₁₋₄-E₁-D₃₋₄]-F′₁₋₈

F₁₋₈-[D₃₋₄-E₁-D₁₋₄]-F′₁₋₈

[0219] wherein region G is within the brackets [Dₙ-Eᵣ-Dₘ], D is a contiguous sequence of DNA nucleosides, E is a modified nucleoside (the gap-breaker or gap-disrupting nucleoside), and F and F′ are the flanking regions as defined herein, and with the proviso that the overall length of the gapmer regions F-G-F′ is at least 12, such as at least 14 nucleotides in length.

[0220] In some embodiments, region G of a gap disrupted gapmer comprises at least 6 DNA nucleosides, such as 6, 7, 8, 9, 10, 11, 12, 13, 14, 15 or 16 DNA nucleosides. As described above, the DNA nucleosides may be contiguous or may optionally be interspersed with one or more modified nucleosides, with the proviso that the gap region G is capable of mediating RNaseH recruitment.

[0221] Gapmer-Flanking Regions, F and F′

[0222] Region F is positioned immediately adjacent to the 5′ DNA nucleoside of region G. The 3′ most nucleoside of region F is a sugar modified nucleoside, such as a high affinity sugar modified nucleoside, for example a 2′ substituted nucleoside, such as a MOE nucleoside, or an LNA nucleoside.

[0223] Region F′ is positioned immediately adjacent to the 3′ DNA nucleoside of region G. The 5′ most nucleoside of region F′ is a sugar modified nucleoside, such as a high affinity sugar modified nucleoside, for example a 2′ substituted nucleoside, such as a MOE nucleoside, or an LNA nucleoside.

[0224] Region F is 1-8 contiguous nucleotides in length, such as 2-6, such as 3-4 contiguous nucleotides in length. Advantageously the 5′ most nucleoside of region F is a sugar modified nucleoside. In some embodiments the two 5′ most nucleoside of region F are sugar modified nucleoside. In some embodiments the 5′ most nucleoside of region F is an LNA nucleoside. In some embodiments the two 5′ most nucleoside of region F are LNA nucleosides. In some embodiments the two 5′ most nucleoside of region F are 2′ substituted nucleoside nucleosides, such as two 3′ MOE nucleosides. In some embodiments the 5′ most nucleoside of region F is a 2′ substituted nucleoside, such as a MOE nucleoside.

[0225] Region F′ is 2-8 contiguous nucleotides in length, such as 3-6, such as 4-5 contiguous nucleotides in length. Advantageously, embodiments the 3′ most nucleoside of region F′ is a sugar modified nucleoside. In some embodiments the two 3′ most nucleoside of region F′ are sugar modified nucleoside. In some embodiments the two 3′ most nucleoside of region F′ are LNA nucleosides. In some embodiments the 3′ most nucleoside of region F′ is an LNA nucleoside. In some embodiments the two 3′ most nucleoside of region F′ are 2′ substituted nucleoside nucleosides, such as two 3′ MOE nucleosides. In some embodiments the 3′ most nucleoside of region F′ is a 2′ substituted nucleoside, such as a MOE nucleoside.

[0226] It should be noted that when the length of region F or F′ is one, it is advantageously an LNA nucleoside.

[0227] In some embodiments, region F and F′ independently consists of or comprises a contiguous sequence of sugar modified nucleosides. In some embodiments, the sugar modified nucleosides of region F may be independently selected from 2′-O-alkyl-RNA units, 2′-O-methyl-RNA, 2′-amino-DNA units, 2′-fluoro-DNA units, 2′-alkoxy-RNA, MOE units, LNA units, arabino nucleic acid (ANA) units and 2′-fluoro-ANA units.

[0228] In some embodiments, region F and F′ independently comprises both LNA and a 2′ substituted modified nucleosides (mixed wing design).

[0229] In some embodiments, region F and F′ consists of only one type of sugar modified nucleosides, such as only MOE or only beta-D-oxy LNA or only ScET. Such designs are also termed uniform flanks or uniform gapmer design.

[0230] In some embodiments, all the nucleosides of region F or F′, or F and F′ are LNA nucleosides, such as independently selected from beta-D-oxy LNA, ENA or ScET nucleosides. In some embodiments region F consists of 1-5, such as 2-4, such as 3-4 such as 1, 2, 3, 4 or 5 contiguous LNA nucleosides. In some embodiments, all the nucleosides of region F and F′ are beta-D-oxy LNA nucleosides.

[0231] In some embodiments, all the nucleosides of region F or F′, or F and F′ are 2′ substituted nucleosides, such as OMe or MOE nucleosides. In some embodiments region F consists of 1, 2, 3, 4, 5, 6, 7, or 8 contiguous OMe or MOE nucleosides. In some embodiments only one of the flanking regions can consist of 2′ substituted nucleosides, such as OMe or MOE nucleosides. In some embodiments it is the 5′ (F) flanking region that consists 2′ substituted nucleosides, such as OMe or MOE nucleosides whereas the 3′ (F′) flanking region comprises at least one LNA nucleoside, such as beta-D-oxy LNA nucleosides or cET nucleosides. In some embodiments it is the 3′ (F′) flanking region that consists 2′ substituted nucleosides, such as OMe or MOE nucleosides whereas the 5′ (F) flanking region comprises at least one LNA nucleoside, such as beta-D-oxy LNA nucleosides or cET nucleosides.

[0232] In some embodiments, all the modified nucleosides of region F and F′ are LNA nucleosides, such as independently selected from beta-D-oxy LNA, ENA or ScET nucleosides, wherein region F or F′, or F and F′ may optionally comprise DNA nucleosides (an alternating flank, see definition of these for more details). In some embodiments, all the modified nucleosides of region F and F′ are beta-D-oxy LNA nucleosides, wherein region F or F′, or F and F′ may optionally comprise DNA nucleosides (an alternating flank, see definition of these for more details).

[0233] In some embodiments the 5′ most and the 3′ most nucleosides of region F and F′ are LNA nucleosides, such as beta-D-oxy LNA nucleosides or ScET nucleosides.

[0234] In some embodiments, the internucleoside linkage between region F and region G is a phosphorothioate internucleoside linkage. In some embodiments, the internucleoside linkage between region F′ and region G is a phosphorothioate internucleoside linkage. In some embodiments, the internucleoside linkages between the nucleosides of region F or F′, F and F′ are phosphorothioate internucleoside linkages.

[0235] Further gapmer designs are disclosed in WO 2004/046160, WO 2007/146511 and WO 2008/113832, hereby incorporated by reference.

[0236] LNA Gapmer

[0237] An LNA gapmer is a gapmer wherein either one or both of region F and F′ comprises or consists of LNA nucleosides. A beta-D-oxy gapmer is a gapmer wherein either one or both of region F and F′ comprises or consists of beta-D-oxy LNA nucleosides.

[0238] In some embodiments the LNA gapmer is of formula: [LNA]₁₋₆-[region G]-[LNA]₁₋₆, wherein region G is as defined in the Gapmer region G definition.

[0239] MOE Gapmers

[0240] A MOE gapmers is a gapmer wherein regions F and F′ consist of MOE nucleosides. In some embodiments the MOE gapmer is of design [MOE]₁₋₈-[Region G]-[MOE]₁₋₈, such as [MOE]₂₋₇-[Region G]₆₋₁₆-[MOE]₂₋₇, such as [MOE]₃₋₆-[Region G]-[MOE]₃₋₈, wherein region G is as defined in the Gapmer definition. MOE gapmers with a 5-10-5 design (MOE-DNA-MOE) have been widely used in the art.

[0241] Mixed Wing Gapmer

[0242] A mixed wing gapmer is an LNA gapmer wherein one or both of region F and F′ comprise a 2′ substituted nucleoside, such as a 2′ substituted nucleoside independently selected from the group consisting of 2′-O-alkyl-RNA units, 2′-O-methyl-RNA, 2′-amino-DNA units, 2′-fluoro-DNA units, 2′-alkoxy-RNA, MOE units, arabino nucleic acid (ANA) units and 2′-fluoro-ANA units, such as a MOE nucleosides. In some embodiments wherein at least one of region F and F′, or both region F and F′ comprise at least one LNA nucleoside, the remaining nucleosides of region F and F′ are independently selected from the group consisting of MOE and LNA. In some embodiments wherein at least one of region F and F′, or both region F and F′ comprise at least two LNA nucleosides, the remaining nucleosides of region F and F′ are independently selected from the group consisting of MOE and LNA. In some mixed wing embodiments, one or both of region F and F′ may further comprise one or more DNA nucleosides.

[0243] Mixed wing gapmer designs are disclosed in WO 2008/049085 and WO 2012/109395, both of which are hereby incorporated by reference.

[0244] Alternating Flank Gapmers

[0245] Flanking regions may comprise both LNA and DNA nucleoside and are referred to as “alternating flanks” as they comprise an alternating motif of LNA-DNA-LNA nucleosides. Gapmers comprising such alternating flanks are referred to as “alternating flank gapmers”. “Alternative flank gapmers” are thus LNA gapmer oligonucleotides where at least one of the flanks (F or F′) comprises DNA in addition to the LNA nucleoside(s). In some embodiments at least one of region F or F′, or both region F and F′, comprise both LNA nucleosides and DNA nucleosides. In such embodiments, the flanking region F or F′, or both F and F′ comprise at least three nucleosides, wherein the 5′ and 3′ most nucleosides of the F and/or F′ region are LNA nucleosides.

[0246] Alternating flank LNA gapmers are disclosed in WO 2016/127002.

[0247] Oligonucleotides with alternating flanks are LNA gapmer oligonucleotides where at least one of the flanks (F or F′) comprises DNA in addition to the LNA nucleoside(s). In some embodiments at least one of region F or F′, or both region F and F′, comprise both LNA nucleosides and DNA nucleosides. In such embodiments, the flanking region F or F′, or both F and F′ comprise at least three nucleosides, wherein the 5′ and 3′ most nucleosides of the F and/or F′ region are LNA nucleosides.

[0248] In some embodiments at least one of region F or F′, or both region F and F′, comprise both LNA nucleosides and DNA nucleosides. In such embodiments, the flanking region F or F′, or both F and F′ comprise at least three nucleosides, wherein the 5′ and 3′ most nucleosides of the F or F′ region are LNA nucleosides, and the. Flanking regions which comprise both LNA and DNA nucleoside are referred to as alternating flanks, as they comprise an alternating motif of LNA-DNA-LNA nucleosides. Alternating flank LNA gapmers are disclosed in WO2016/127002.

[0249] An alternating flank region may comprise up to 3 contiguous DNA nucleosides, such as 1 to 2 or 1 or 2 or 3 contiguous DNA nucleosides.

[0250] The alternating flak can be annotated as a series of integers, representing a number of LNA nucleosides (L) followed by a number of DNA nucleosides (D), for example

[L]₁₋₃-[D]₁₋₄-[L]₁₋₃

[L]₁₋₂-[D]₁₋₂-[L]₁₋₂-[D]₁₋₂-[L]₁₋₂

[0251] In oligonucleotide designs these will often be represented as numbers such that 2-2-1 represents 5′[L]₂-[D]₂-[L] 3′, and 1-1-1-1-1 represents 5′[L]-[D]-[L]-[D]-[L] 3′. The length of the flank (region F and F′) in oligonucleotides with alternating flanks may independently be 3 to 10 nucleosides, such as 4 to 8, such as 5 to 6 nucleosides, such as 4, 5, 6 or 7 modified nucleosides. In some embodiments only one of the flanks in the gapmer oligonucleotide is alternating while the other is constituted of LNA nucleotides. It may be advantageous to have at least two LNA nucleosides at the 3′ end of the 3′ flank (F′), to confer additional exonuclease resistance. Some examples of oligonucleotides with alternating flanks are:

[L]₁₋₅-[D]₁₋₄-[L]₁₋₃-[G]₅₋₁₆-[L]₂₋₆

[L]₁₋₂-[D]₁₋₂-[L]₁₋₂-[D]₁₋₂-[L]₁₋₂[G]₅₋₁₆-[L]₁₋₂-[D]₁₋₃-[L]₂₋₄

[L]₁₋₅-[G]₅₋₁₆-[L]-[D]-[L]-[D]-[L]₂

[0252] with the proviso that the overall length of the gapmer is at least 12, such as at least 14 nucleotides in length.

[0253] Region D′ or D″ in an Oligonucleotide

[0254] The oligonucleotide of the invention may in some embodiments comprise or consist of the contiguous nucleotide sequence of the oligonucleotide which is complementary to the target nucleic acid, such as the gapmer F-G-F′, and further 5′ and/or 3′ nucleosides. The further 5′ and/or 3′ nucleosides may or may not be fully complementary to the target nucleic acid. Such further 5′ and/or 3′ nucleosides may be referred to as region D′ and D″ herein.

[0255] The addition of region D′ or D″ may be used for the purpose of joining the contiguous nucleotide sequence, such as the gapmer, to a conjugate moiety or another functional group. When used for joining the contiguous nucleotide sequence with a conjugate moiety is can serve as a biocleavable linker. Alternatively it may be used to provide exonucleoase protection or for ease of synthesis or manufacture.

[0256] Region D′ and D″ can be attached to the 5′ end of region F or the 3′ end of region F′, respectively to generate designs of the following formulas D′-F-G-F′, F-G-F′-D″ or

[0257] D′-F-G-F′-D″. In this instance the F-G-F′ is the gapmer portion of the oligonucleotide and region D′ or D″ constitute a separate part of the oligonucleotide.

[0258] Region D′ or D″ may independently comprise or consist of 1, 2, 3, 4 or 5 additional nucleotides, which may be complementary or non-complementary to the target nucleic acid. The nucleotide adjacent to the F or F′ region is not a sugar-modified nucleotide, such as a DNA or RNA or base modified versions of these. The D′ or D′ region may serve as a nuclease susceptible biocleavable linker (see definition of linkers). In some embodiments the additional 5′ and/or 3′ end nucleotides are linked with phosphodiester linkages, and are DNA or RNA. Nucleotide based biocleavable linkers suitable for use as region D′ or D″ are disclosed in WO 2014/076195, which include by way of example a phosphodiester linked DNA dinucleotide. The use of biocleavable linkers in poly-oligonucleotide constructs is disclosed in WO 2015/113922, where they are used to link multiple antisense constructs (e.g. gapmer regions) within a single oligonucleotide.

[0259] In one embodiment the oligonucleotide of the invention comprises a region D′ and/or D″ in addition to the contiguous nucleotide sequence which constitutes the gapmer.

[0260] In some embodiments, the oligonucleotide of the present invention can be represented by the following formulae:

F-G-F′; in particular F₁₋₈-G₅₋₁₆-F₂₋₈

D′-F-G-F′, in particular D′₁₋₃-F₁₋₈-G₅₋₁₆-F₂₋₈

F-G-F′-D″, in particular F₁₋₈-G₅₋₁₆-F₂₋₈-D″₁₋₃

D′-F-G-F′-D″, in particular D′₁₋₃-F₁₋₈-G₅₋₁₆-F₂₋₈-D″₁₋₃

[0261] In some embodiments the internucleoside linkage positioned between region D′ and region F is a phosphodiester linkage. In some embodiments the internucleoside linkage positioned between region F′ and region D″ is a phosphodiester linkage.

[0262] Conjugate

[0263] The term conjugate as used herein refers to an oligonucleotide which is covalently linked to a non-nucleotide moiety (conjugate moiety or region C or third region).

[0264] Conjugation of the oligonucleotide of the invention to one or more non-nucleotide moieties may improve the pharmacology of the oligonucleotide, e.g. by affecting the activity, cellular distribution, cellular uptake or stability of the oligonucleotide. In some embodiments the conjugate moiety modify or enhance the pharmacokinetic properties of the oligonucleotide by improving cellular distribution, bioavailability, metabolism, excretion, permeability, and/or cellular uptake of the oligonucleotide. In particular the conjugate may target the oligonucleotide to a specific organ, tissue or cell type and thereby enhance the effectiveness of the oligonucleotide in that organ, tissue or cell type. A the same time the conjugate may serve to reduce activity of the oligonucleotide in non-target cell types, tissues or organs, e.g. off target activity or activity in non-target cell types, tissues or organs. WO 93/07883 and WO2013/033230 provides suitable conjugate moieties, which are hereby incorporated by reference. Further suitable conjugate moieties are those capable of binding to the asialoglycoprotein receptor (ASGPr). In particular tri-valent N-acetylgalactosamine conjugate moieties are suitable for binding to the ASGPr, see for example WO 2014/076196, WO 2014/207232 and WO 2014/179620 (hereby incorporated by reference, in particular, FIG. 13 of WO2014/076196 or claims 158-164 of WO2014/179620).

[0265] Oligonucleotide conjugates and their synthesis has also been reported in comprehensive reviews by Manoharan in Antisense Drug Technology, Principles, Strategies, and Applications, S. T. Crooke, ed., Ch. 16, Marcel Dekker, Inc., 2001 and Manoharan, Antisense and Nucleic Acid Drug Development, 2002, 12, 103, each of which is incorporated herein by reference in its entirety.

[0266] In an embodiment, the non-nucleotide moiety (conjugate moiety) is selected from the group consisting of carbohydrates, cell surface receptor ligands, drug substances, hormones, lipophilic substances, polymers, proteins, peptides, toxins (e.g. bacterial toxins), vitamins, viral proteins (e.g. capsids) or combinations thereof.

[0267] Linkers

[0268] A linkage or linker is a connection between two atoms that links one chemical group or segment of interest to another chemical group or segment of interest via one or more covalent bonds. Conjugate moieties can be attached to the oligonucleotide directly or through a linking moiety (e.g. linker or tether). Linkers serve to covalently connect a third region, e.g. a conjugate moiety (Region C), to a first region, e.g. an oligonucleotide or contiguous nucleotide sequence complementary to the target nucleic acid (region A), thereby connecting one of the termini of region A to C.

[0269] In some embodiments of the invention the conjugate or oligonucleotide conjugate of the invention may optionally, comprise a linker region (second region or region B and/or region Y) which is positioned between the oligonucleotide or contiguous nucleotide sequence complementary to the target nucleic acid (region A or first region) and the conjugate moiety (region C or third region).

[0270] Region B refers to biocleavable linkers comprising or consisting of a physiologically labile bond that is cleavable under conditions normally encountered or analogous to those encountered within a mammalian body. Conditions under which physiologically labile linkers undergo chemical transformation (e.g., cleavage) include chemical conditions such as pH, temperature, oxidative or reductive conditions or agents, and salt concentration found in or analogous to those encountered in mammalian cells. Mammalian intracellular conditions also include the presence of enzymatic activity normally present in a mammalian cell such as from proteolytic enzymes or hydrolytic enzymes or nucleases. In one embodiment the biocleavable linker is susceptible to 51 nuclease cleavage. In a preferred embodiment the nuclease susceptible linker comprises between 1 and 10 nucleosides, such as 1, 2, 3, 4, 5, 6, 7, 8, 9 or 10 nucleosides, more preferably between 2 and 6 nucleosides and most preferably between 2 and 4 linked nucleosides comprising at least two consecutive phosphodiester linkages, such as at least 3 or 4 or 5 consecutive phosphodiester linkages. Preferably the nucleosides are DNA or RNA. Phosphodiester containing biocleavable linkers are described in more detail in WO 2014/076195 (hereby incorporated by reference).

[0271] Conjugates may also be linked to the oligonucleotide via non-biocleavable linkers, or in some embodiments the conjugate may comprise a non-cleavable linker which is covalently attached to the biocleavable linker (region Y). Linkers that are not necessarily biocleavable but primarily serve to covalently connect a conjugate moiety (region C or third region), to an oligonucleotide (region A or first region), may comprise a chain structure or an oligomer of repeating units such as ethylene glycol, amino acid units or amino alkyl groups The oligonucleotide conjugates of the present invention can be constructed of the following regional elements A-C, A-B-C, A-B-Y-C, A-Y-B-C or A-Y-C. In some embodiments the non-cleavable linker (region Y) is an amino alkyl, such as a C2-C36 amino alkyl group, including, for example C6 to C12 amino alkyl groups. In a preferred embodiment the linker (region Y) is a C6 amino alkyl group. Conjugate linker groups may be routinely attached to an oligonucleotide via use of an amino modified oligonucleotide, and an activated ester group on the conjugate group.

[0272] Treatment

[0273] The term ‘treatment’ as used herein refers to both treatment of an existing disease (e.g. a disease or disorder as herein referred to), or prevention of a disease, i.e. prophylaxis. It will therefore be recognized that treatment as referred to herein may, in some embodiments, be prophylactic.

### DETAILED DESCRIPTION OF THE INVENTION

[0274] The Oligonucleotides of the Invention

[0275] The invention relates to oligonucleotides capable of inhibiting expression of FNDC3B. The inhibition may be achieved by hybridizing to a target nucleic acid encoding FNDC3B or which is involved in the regulation of FNDC3B. The target nucleic acid may be a mammalian FNDC3B sequence, such as a sequence selected from the group consisting of SEQ ID NO: 1, 2, 3, 4, 5, 6, 7 and 8.

[0276] The oligonucleotide of the invention is an antisense oligonucleotide which targets FNDC3B.

[0277] In some embodiments the antisense oligonucleotide of the invention is capable of modulating the expression of the target by inhibiting or reducing target expression. Preferably, such inhibition of expression is at least 20% compared to the normal expression level of the target, more preferably at least 30%, at least 40%, at least 50%, at least 60%, at least 70%, at least 80%, at least 90% or at least 95% inhibition compared to the normal expression level of the target. In some embodiments oligonucleotides of the invention may be capable of inhibiting expression levels of FNDC3B mRNA by at least 60% or at least 70% in vitro using HeLa cells.

[0278] In some embodiments compounds of the invention may be capable of inhibiting expression levels of FNDC3B protein by at least 50% in vitro using HeLa cells. Suitably, the examples provide assays which may be used to measure FNDC3B RNA or protein inhibition (e.g. example 1). The target modulation is triggered by the hybridization between a contiguous nucleotide sequence of the oligonucleotide and the target nucleic acid. In some embodiments the oligonucleotide of the invention comprises mismatches between the oligonucleotide and the target nucleic acid. Despite mismatches hybridization to the target nucleic acid may still be sufficient to show a desired modulation of FNDC3B expression. Reduced binding affinity resulting from mismatches may advantageously be compensated by increased number of nucleotides in the oligonucleotide and/or an increased number of modified nucleosides capable of increasing the binding affinity to the target, such as 2′ sugar modified nucleosides, including LNA, present within the oligonucleotide sequence.

[0279] An aspect of the present invention relates to an antisense oligonucleotide of 10 to 50, such as 10-30, nucleotides in length, which comprises a contiguous nucleotide sequence of 10 to 30 nucleotides in length with at least 90% complementarity, such as full complementarity, to a mammalian FNDC3B encoding target nucleic acid, wherein the antisense oligonucleotide is capable of reducing the expression of the mammalian FNDC3B encoding target nucleic acid in a cell.

[0280] An aspect of the present invention relates to an antisense oligonucleotide of 10 to 30 nucleotides in length, which comprises a contiguous nucleotide sequence of 12 to 22 nucleotides in length with at least 90% complementarity, such as full complementarity, to a mammalian FNDC3B encoding target nucleic acid, wherein the antisense oligonucleotide is capable of reducing the expression of the mammalian FNDC3B encoding target nucleic acid in a cell.

[0281] In some embodiments, the oligonucleotide comprises a contiguous nucleotide sequence of 10 to 30 nucleotides in length, such as 12-22 nucleotides in length, which is at least 90% complementary, such as at least 91%, such as at least 92%, such as at least 93%, such as at least 94%, such as at least 95%, such as at least 96%, such as at least 97%, such as at least 98%, or 100% complementary with the target nucleic acid or the target sequence.

[0282] In a preferred embodiment the antisense oligonucleotide of the invention, or contiguous nucleotide sequence thereof is fully complementary (100% complementary) to the target nucleic acid or the target sequence, or in some embodiments may comprise one or two mismatches between the oligonucleotide and the target nucleic acid.

[0283] Another aspect of the present invention relates to the antisense oligonucleotide, wherein the contiguous nucleotide sequence is at least 90% complementary to a sequence selected from the group consisting of SEQ ID NO1, 2, 3, 4, 5, 6, 7 and 8, or a naturally occurring variant thereof.

[0284] In some embodiments the oligonucleotide sequence or contiguous nucleotide sequence is at least 90% complementary or at least 95% complementary such as fully complementary to a corresponding target sequence present in SEQ ID NO: 1 and SEQ ID NO: 8. In some embodiments the contiguous sequence of the antisense oligonucleotide is fully complementary to the mammalian FNDC3B encoding target nucleic acid.

[0285] In a preferred embodiment the oligonucleotide sequence or contiguous nucleotide sequence is 100% complementary to a corresponding target sequence present in SEQ ID NO: 1 and SEQ ID NO: 8.

[0286] Another aspect of the present invention relates to the antisense oligonucleotide, wherein the contiguous nucleotide sequence is at least 90% complementary, such as fully complementary, to an intron region present in the pre-mRNA of mammalian FNDC3B encoding target nucleic acid (e.g. SEQ ID NO 1).

[0287] It shall be understood that intron positions on SEQ ID NO: 1 may vary depending on different splicing of FND3B pre-mRNA. In the context of the present invention any nuclotide sequence in the gene sequence or pre-mRNA that is removed from the pre-mRNA by RNA splicing during maturation of the final RNA product (mature mRNA) are introns irrespectively on their position on SEQ ID NO: 1. Table 1 provides the most common intron regions in SEQ ID NO: 1.

[0288] In a preferred embodiment the present invention relates to the antisense oligonucleotide, wherein the contiguous nucleotide sequence is at least 90% complementary, such as fully complementary, to an intron region present in the pre-mRNA of human FNDC3B, selected from position 145-72824 on SEQ ID NO: 1), position 72964-93844 on SEQ ID NO: 1, and position 93920-147084 on SEQ ID NO: 1.

[0289] In another preferred embodiment the present invention relates to the antisense oligonucleotide, wherein the contiguous nucleotide sequence is at least 90% complementary, such as fully complementary, to position 145-72824 of on the human pre-mRNA of FNDC3B encoding target nucleic acid, such as SEQ ID NO: 1.

[0290] In another preferred embodiment the present invention relates to the antisense oligonucleotide, wherein the contiguous nucleotide sequence is at least 90% complementary, such as fully complementary, to SEQ ID NO 9.

[0291] In another preferred embodiment the present invention relates to the antisense oligonucleotide, wherein the contiguous nucleotide sequence is at least 90% complementary, such as fully complementary, to SEQ ID NO 10.

[0292] In another preferred embodiment the present invention relates to the antisense oligonucleotide, wherein the contiguous nucleotide sequence is at least 90% complementary, such as fully complementary, to SEQ ID NO 19.

[0293] In another preferred embodiment the present invention relates to the antisense oligonucleotide, wherein the contiguous nucleotide sequence is at least 90% complementary, such as fully complementary, to SEQ ID NO 20.

[0294] In some embodiment the oligonucleotide or contiguous nucleotide sequence is complementary to a region of the target nucleic acid, wherein the target nucleic acid region is selected from the group consisting of position 54366-54385, 54407-54426, 54448-54467, 54489-54508, 54530-54549, 54571-54590, 54612-54631; 54367-54384, 54408-54425, 54449-54466, 54490-54507, 54531-54548, 54572-54589, 54613-54630; 54368-54383, 54409-54424, 54450-54465, 54491-54506, 54532-54547, 54573-54588, 54614-54629; 54366-54379, 54407-54420, 54448-54461, 54489-54502, 54530-54543, 54571-54584, 54612-54625, 351016-351033; 351016-351029; 351016-351035; 351 01 8-351 33 of SEQ ID NO: 1.

[0295] According to one aspect of the invention, the target sequence is repeated within the target nucleic acid, i.e. at least two identical target nucleotide sequences (target regions) of at least 10 nucleotides in length occur in the target nucleic acid at different positions. A repeated target region is generally between 10 and 50 nucleotides, such as between 11 and 30 nucleotides, such as between 12 and 25 nucleotides, such as between 13 and 22 nucleotides, such as between 14 and 20 nucleotides, such as between 15 and 19 nucleotides, such as between 16 and 18 nucleotides. In a preferred embodiment the repeated target region is between 14 and 20 nucleotides.

[0296] In one aspect the invention provides antisense oligonucleotides wherein the contiguous nucleotide sequence is at least 90% complementary, such as fully complementary, to a target region that is repeated at least 2 times across the target nucleic acid of SEQ ID NO: 1. The effect of this is that several oligonucleotide compounds (with the same sequence) can hybridize to one or more target regions on the same target nucleic acid (at the same time), which may result in multiple cleavage events of the target nucleic acid when the oligonucleotide is administered to a cell or an animal or a human.

[0297] In some embodiments the oligonucleotide or the contiguous nucleotide sequence is at least 90% complementary, such as fully complementary to a target region that is repeated at least at least 3 repeated target regions, such as at least 4, 5, 6, 7, 8, 9 or 10 repeated target regions, or more than 10 repeated target regions.

[0298] In a further embodiment the antisense oligonucleotide comprises a contiguous nucleotide sequence that is at least 90% complementary, such as fully complementary, to a target region of 10-22, such as 14-20, nucleotides in length of the target nucleic acid of SEQ ID NO: 1, wherein the target region is repeated at least 2 or more times across the intons of the target nucleic acid.

[0299] In some embodiments, the antisense oligonucleotide of the invention or the contiguous nucleotide sequence thereof is complementary to at least 6 repeated target regions in SEQ ID NO: 10.

[0300] In some embodiments, the oligonucleotide of the invention comprises or consists of 10 to 35 nucleotides in length, such as from 10 to 30, such as 11 to 22, such as from 12 to 20, such as from 14 to 18 or 14 to 16 contiguous nucleotides in length. Advantageously, the oligonucleotide comprises or consists of 14 to 20 nucleotides in length.

[0301] It is to be understood that any range given herein includes the range endpoints.

[0302] In some embodiments, the oligonucleotide or contiguous nucleotide sequence thereof comprises or consists of 22 or less nucleotides, such as 20 or less nucleotides, such as 18 or less nucleotides, such as less than 18, such as 14, 15, 16 or 17 nucleotides.

[0303] In some embodiments, the antisense oligonucleotide or contiguous nucleotide sequence thereof, comprises or consists of 10 to 30 nucleotides in length with at least 90% identity, preferably 100% identity, to a sequence selected from the group consisting of SEQ ID NO: 11 to 18.

[0304] In some embodiments, the antisense oligonucleotide or contiguous nucleotide sequence thereof comprises or consists of 10 to 30 contiguous nucleotides in length with at least 90% identity, preferably 100% identity, to a sequence selected from SEQ ID NO: 15 to 18.

[0305] In some embodiments, the antisense oligonucleotide or contiguous nucleotide sequence thereof comprises or consists of 10 to 30 contiguous nucleotides in length with at least 90% identity, preferably 100% identity, to a sequence selected from SEQ ID NO: 11 to 14.

[0306] In some embodiments, the antisense oligonucleotide or contiguous nucleotide sequence thereof comprises or consists of 12 to 20 contiguous nucleotides in length with at least 90% identity, preferably 100% identity, to a sequence selected from SEQ ID NO: 15 to 18.

[0307] In some embodiments, the antisense oligonucleotide or contiguous nucleotide sequence thereof comprises or consists of 12 to 20 contiguous nucleotides in length with at least 90% identity, preferably 100% identity, to a sequence selected from SEQ ID NO: 11 to 14.

[0308] In some embodiments, the antisense oligonucleotide or contiguous nucleotide sequence thereof comprises or consists of 14 to 20 contiguous nucleotides in length with at least 90% identity, preferably 100% identity, to a sequence selected from SEQ ID NO: 15 to 18.

[0309] In some embodiments, the antisense oligonucleotide or contiguous nucleotide sequence thereof comprises or consists of 14 to 20 contiguous nucleotides in length with at least 90% identity, preferably 100% identity, to a sequence selected from SEQ ID NO: 11 to 14.

[0310] In some embodiments, the antisense oligonucleotide or contiguous nucleotide sequence (motif sequence) thereof consists of a sequence selected from SEQ ID NO: 15 to 18.

[0311] In some embodiments, the antisense oligonucleotide or contiguous nucleotide sequence (motif sequence) thereof consists of a sequence selected from SEQ ID NO: 11 to 14.

[0312] It is understood that the contiguous nucleobase sequences (motif sequence) can be modified to for example increase nuclease resistance and/or binding affinity to the target nucleic acid. Modifications are described in the definitions and in the following paragraphs. Table 4 lists preferred designs of each motif sequence.

[0313] The pattern in which the modified nucleosides (such as high affinity modified nucleosides) are incorporated into the oligonucleotide sequence is generally termed oligonucleotide design.

[0314] The oligonucleotides of the invention are designed with modified nucleosides and DNA nucleosides. Advantageously, high affinity modified nucleosides are used.

[0315] In an embodiment, the oligonucleotide comprises at least 1 modified nucleoside, such as at least 2, at least 3, at least 4, at least 5, at least 6, at least 7, at least 8, at least 9, at least 10, at least 11, at least 12, at least 13, at least 14, at least 15 or at least 16 modified nucleosides. In an embodiment the oligonucleotide comprises from 1 to 10 modified nucleosides, such as from 2 to 9 modified nucleosides, such as from 3 to 8 modified nucleosides, such as from 4 to 7 modified nucleosides, such as 6 or 7 modified nucleosides. Suitable modifications are described in the “Definitions” section under “modified nucleoside”, “high affinity modified nucleosides”, “sugar modifications”, “2′ sugar modifications” and Locked nucleic acids (LNA)”.

[0316] In an embodiment, the oligonucleotide comprises one or more sugar modified nucleosides, such as 2′ sugar modified nucleosides. Preferably the oligonucleotide of the invention comprise one or more 2′ sugar modified nucleoside independently selected from the group consisting of 2′-O-alkyl-RNA, 2′-O-methyl-RNA, 2′-alkoxy-RNA, 2′-O-methoxyethyl-RNA, 2′-amino-DNA, 2′-fluoro-DNA, arabino nucleic acid (ANA), 2′-fluoro-ANA and LNA nucleosides. It is advantageous if one or more of the modified nucleoside(s) is a locked nucleic acid (LNA).

[0317] In a further embodiment the oligonucleotide comprises at least one modified internucleoside linkage. Suitable internucleoside modifications are described in the “Definitions” section under “Modified internucleoside linkage”. It is advantageous if at least 75%, such as all, the internucleoside linkages within the contiguous nucleotide sequence are phosphorothioate or boranophosphate internucleoside linkages. In some embodiments all the internucleotide linkages in the contiguous sequence of the oligonucleotide are phosphorothioate linkages.

[0318] In some embodiments, the oligonucleotide of the invention comprises at least one LNA nucleoside, such as 1, 2, 3, 4, 5, 6, 7, or 8 LNA nucleosides, such as from 2 to 6 LNA nucleosides, such as from 3 to 7 LNA nucleosides, 4 to 8 LNA nucleosides or 3, 4, 5, 6, 7 or 8 LNA nucleosides. In some embodiments, at least 75% of the modified nucleosides in the oligonucleotide are LNA nucleosides, such as 80%, such as 85%, such as 90% of the modified nucleosides are LNA nucleosides. In a still further embodiment all the modified nucleosides in the oligonucleotide are LNA nucleosides. In a further embodiment, the oligonucleotide may comprise both beta-D-oxy-LNA, and one or more of the following LNA nucleosides: thio-LNA, amino-LNA, oxy-LNA, ScET and/or ENA in either the beta-D or alpha-L configurations or combinations thereof. In a further embodiment, all LNA cytosine units are 5-methyl-cytosine. It is advantageous for the nuclease stability of the oligonucleotide or contiguous nucleotide sequence to have at least 1 LNA nucleoside at the 5′ end and at least 2 LNA nucleosides at the 3′ end of the nucleotide sequence.

[0319] In an embodiment of the invention the oligonucleotide of the invention is capable of recruiting RNase H.

[0320] In the current invention an advantageous structural design is a gapmer design as described in the “Definitions” section under for example “Gapmer”, “LNA Gapmer”, “MOE gapmer” and “Mixed Wing Gapmer” “Alternating Flank Gapmer”. The gapmer design includes gapmers with uniform flanks, mixed wing flanks, alternating flanks, and gapbreaker designs. In the present invention it is advantageous if the oligonucleotide of the invention is a gapmer with an F-G-F′ design. In some embodiments the gapmer is an LNA gapmer with uniform flanks.

[0321] In some embodiments of the invention the LNA gapmer is selected from the following uniform flank designs 3-12-3, 3-9-2, 4-10-2, or 4-9-3.

[0322] Exemplary Compounds of the Invention

[0323] In the exemplified oligonucleotide compounds, capital letters represent beta-D-oxy LNA nucleosides, lowercase letters represent DNA nucleosides, all LNA C are 5-methyl cytosine, and 5-methyl DNA cytosines may be present in the gap region and would be presented by “e” or ^{m}c, all internucleoside linkages are phosphorothioate internucleoside linkages.

[0324] For some embodiments of the invention, the oligonucleotide is selected from the group of oligonucleotide compounds with CMP-ID-NO: 11_1; 12_1; 13_1 and 14_1.

[0325] In one embodiment of the invention the oligonucleotide is CMP-ID-NO: 13_1 or 14_1.

[0326] For some embodiments of the invention, the oligonucleotide is selected from the group of oligonucleotide compounds with CMP-ID-NO 15_1; 16_1; 17_1; 18_1.

[0327] Method of Manufacture

[0328] In a further aspect, the invention provides methods for manufacturing the oligonucleotides of the invention comprising reacting nucleotide units and thereby forming covalently linked contiguous nucleotide units comprised in the oligonucleotide. Preferably, the method uses phophoramidite chemistry (see for example Caruthers et al, 1987, Methods in Enzymology vol. 154, pages 287-313). In a further embodiment the method further comprises reacting the contiguous nucleotide sequence with a conjugating moiety (ligand). In a further aspect a method is provided for manufacturing the composition of the invention, comprising mixing the oligonucleotide or conjugated oligonucleotide of the invention with a pharmaceutically acceptable diluent, solvent, carrier, salt and/or adjuvant.

[0329] Pharmaceutical Salt

[0330] In a further aspect the invention provides a pharmaceutically acceptable salt of the antisense oligonucleotide or a conjugate thereof. In a preferred embodiment, the pharmaceutically acceptable salt is a sodium or a potassium salt.

[0331] Pharmaceutical Composition

[0332] In a further aspect, the invention provides pharmaceutical compositions comprising any of the aforementioned oligonucleotides and/or oligonucleotide conjugates or salts thereof and a pharmaceutically acceptable diluent, carrier, salt and/or adjuvant. A pharmaceutically acceptable diluent includes phosphate-buffered saline (PBS) and pharmaceutically acceptable salts include, but are not limited to, sodium and potassium salts. In some embodiments the pharmaceutically acceptable diluent is sterile phosphate buffered saline. In some embodiments the oligonucleotide is used in the pharmaceutically acceptable diluent at a concentration of 50-300 μM solution.

[0333] Suitable formulations for use in the present invention are found in Remington's Pharmaceutical Sciences, Mack Publishing Company, Philadelphia, Pa., 17th ed., 1985. For a brief review of methods for drug delivery, see, e.g., Langer (Science 249:1527-1533, 1990). WO 2007/031091 provides further suitable and preferred examples of pharmaceutically acceptable diluents, carriers and adjuvants (hereby incorporated by reference). Suitable dosages, formulations, administration routes, compositions, dosage forms, combinations with other therapeutic agents, pro-drug formulations are also provided in WO2007/031091.

[0334] Oligonucleotides or oligonucleotide conjugates of the invention may be mixed with pharmaceutically acceptable active or inert substances for the preparation of pharmaceutical compositions or formulations. Compositions and methods for the formulation of pharmaceutical compositions are dependent upon a number of criteria, including, but not limited to, route of administration, extent of disease, or dose to be administered.

[0335] These compositions may be sterilized by conventional sterilization techniques, or may be sterile filtered. The resulting aqueous solutions may be packaged for use as is, or lyophilized, the lyophilized preparation being combined with a sterile aqueous carrier prior to administration. The pH of the preparations typically will be between 3 and 11, more preferably between 5 and 9 or between 6 and 8, and most preferably between 7 and 8, such as 7 to 7.5. The resulting compositions in solid form may be packaged in multiple single dose units, each containing a fixed amount of the above-mentioned agent or agents, such as in a sealed package of tablets or capsules. The composition in solid form can also be packaged in a container for a flexible quantity, such as in a squeezable tube designed for a topically applicable cream or ointment.

[0336] In some embodiments, the oligonucleotide or oligonucleotide conjugate of the invention is a prodrug. In particular with respect to oligonucleotide conjugates the conjugate moiety is cleaved of the oligonucleotide once the prodrug is delivered to the site of action, e.g. the target cell.

[0337] Applications

[0338] The oligonucleotides of the invention may be utilized as research reagents for, for example, diagnostics, therapeutics and prophylaxis.

[0339] In research, such oligonucleotides may be used to specifically modulate the synthesis of FNDC3B protein in cells (e.g. in vitro cell cultures) and experimental animals thereby facilitating functional analysis of the target or an appraisal of its usefulness as a target for therapeutic intervention. Typically the target modulation is achieved by degrading or inhibiting the mRNA producing the protein, thereby prevent protein formation or by degrading or inhibiting a modulator of the gene or mRNA producing the protein. Further advantages may be achieved by targeting pre-mRNA thereby preventing formation of the mature mRNA.

[0340] If employing the oligonucleotide of the invention in research or diagnostics the target nucleic acid may be a cDNA or a synthetic nucleic acid derived from DNA or RNA.

[0341] The present invention provides an in vivo or in vitro method for modulating FNDC3B expression in a target cell which is expressing FNDC3B, said method comprising administering an oligonucleotide of the invention in an effective amount to said cell.

[0342] In some embodiments, the target cell, is a mammalian cell in particular a human cell. The target cell may be an in vitro cell culture or an in vivo cell forming part of a tissue in a mammal. In preferred embodiments the target cell is present in, or is isolate or derived from, stomach, gut, liver, lungs, pancreas, islet of Langerhans, placenta, or testis.

[0343] In diagnostics the oligonucleotides may be used to detect and quantitate FNDC3B expression in cell and tissues by northern blotting, in-situ hybridisation or similar techniques.

[0344] For therapeutics, an animal or a human, suspected of having a disease or disorder, which can be treated by reducing the expression of FNDC3B.

[0345] The invention provides methods for treating or preventing a disease, comprising administering a therapeutically or prophylactically effective amount of an antisense oligonucleotide, an oligonucleotide conjugate, a pharmaceutical salt or a pharmaceutical composition of the invention to a subject suffering from or susceptible to the disease.

[0346] The invention also relates to an antisense oligonucleotide, a pharmaceutical salt, a composition or a conjugate as defined herein for use as a medicament.

[0347] The antisense oligonucleotide, oligonucleotide conjugate or a pharmaceutical composition according to the invention is typically administered in an effective amount.

[0348] The invention also provides for the use of the antisense oligonucleotide or oligonucleotide conjugate of the invention as described for the manufacture of a medicament for the treatment of a disorder as referred to herein, or for a method of the treatment of as a disorder as referred to herein.

[0349] The disease or disorder, as referred to herein, is associated with the increased expression of FNDC3B.

[0350] The methods of the invention are preferably employed for treatment or prophylaxis against diseases caused by abnormally high levels and/or activity of FNDC3B.

[0351] The invention further relates to use of an antisense oligonucleotide, oligonucleotide conjugate, a pharmaceutical salt or a pharmaceutical composition as defined herein for the manufacture of a medicament for the treatment of abnormally high levels and/or activity of FNDC3B.

[0352] In one embodiment, the invention relates to oligonucleotides, oligonucleotide conjugates or pharmaceutical compositions for use in the treatment of diseases or disorders selected from cancers, such as hepatocellular carcinoma and/or acute myeloid leukemia.

[0353] Administration

[0354] In a non-limiting embodiment the antisense oligonucleotide, a conjugate, a pharmaceutical salt or pharmaceutical compositions of the present invention are administered by a parenteral route including intravenous, intraarterial, subcutaneous, intraperitoneal or intramuscular injection or infusion. In one non-limiting embodiment the active oligonucleotide or oligonucleotide conjugate is administered intravenously.

[0355] In some embodiments, the antisense oligonucleotide, oligonucleotide conjugate or pharmaceutical composition of the invention is administered at a dose of 0.1-15 mg/kg, such as from 0.2-10 mg/kg, such as from 0.25-5 mg/kg. The administration can be once a week, every 2^{nd} week, every third week or even once a month.

[0356] The invention also provides for the use of the oligonucleotide or oligonucleotide conjugate of the invention as described for the manufacture of a medicament wherein the medicament is in a dosage form for intravenous administration.

[0357] Combination Therapies

[0358] In some embodiments the antisense oligonucleotide, oligonucleotide conjugate or pharmaceutical composition of the invention is for use in a combination treatment with another therapeutic agent. The therapeutic agent can for example be the standard of care for the diseases or disorders described above.

### Embodiments

[0359] The following embodiments of the present invention may be used in combination with any other embodiments described herein.

[0360] 1. An antisense oligonucleotide of 10 to 50 nucleotides in length, which comprises a contiguous nucleotide sequence of 10 to 30 nucleotides in length with at least 90% complementarity to a mammalian FNDC3B encoding target nucleic acid, wherein the antisense oligonucleotide is capable of reducing the expression of the mammalian FNDC3B encoding target nucleic acid, in a cell.

[0361] 2. The antisense oligonucleotide according to embodiment 1, wherein the contiguous nucleotide sequence is at least 90% complementary to a sequence selected from the group consisting of SEQ ID NO 1, 2, 3, 4, 5, 6, 7 and 8, or a naturally occurring variant thereof.

[0362] 3. The antisense oligonucleotide of embodiment 1 or 2, wherein the contiguous nucleotide sequence is fully complementary to the mammalian FNDC3B encoding target nucleic acid.

[0363] 4. The antisense oligonucleotide according to any one of embodiments 1 to 3, wherein the contiguous nucleotide sequence is at least 90% complementary, such as fully complementary, to an intron region present in the pre-mRNA of mammalian FNDC3B target nucleic acid (e.g. SEQ ID NO 1).

[0364] 5. The antisense oligonucleotide according to any one of embodiments 1-4, wherein the contiguous nucleotide sequence is at least 90% complementary, such as fully complementary, to an intron region present in the pre-mRNA of human FNDC3B, selected from position 145-72824 on SEQ ID NO: 1, position 72964-93844 on SEQ ID NO: 1, and position 93920-147084 on SEQ ID NO: 1.

[0365] 6. The antisense oligonucleotide according to any one of embodiments 1-5, wherein the contiguous nucleotide sequence is at least 90% complementary, such as fully complementary, to a position 145-72824 on the human pre-mRNA of mammalian FNDC3B encoding target nucleic acid, such as SEQ ID NO: 1.

[0366] 7. The antisense oligonucleotide according to any one of embodiments 1-6, wherein the contiguous nucleotide sequence is at least 90% complementary, such as fully complementary, to SEQ ID NO 9.

[0367] 8. The antisense oligonucleotide according to any one of embodiments 1-7, wherein the contiguous nucleotide sequence is at least 90% complementary, such as fully complementary, to a target region of SEQ ID NO 1, selected from the group consisting of position 54366-54385, 54407-54426, 54448-54467, 54489-54508, 54530-54549, 54571-54590, 54612-54631; 54367-54384, 54408-54425, 54449-54466, 54490-54507, 54531-54548, 54572-54589, 54613-54630; 54368-54383, 54409-54424, 54450-54465, 54491-54506, 54532-54547, 54573-54588, 54614-54629; 54366-54379, 54407-54420, 54448-54461, 54489-54502, 54530-54543, 54571-54584, 54612-54625; 351016-351033; 351016-351029; 351016-351035; 351 01 8-351 33 of SEQ ID NO:

[0368] 9. The antisense oligonucleotide according to any one of embodiments 1-8, wherein the contiguous nucleotide sequence is at least 90% complementary, such as fully complementary, to more than one target region of SEQ ID NO 1, said one or more target regions being identical to each other.

[0369] 10. The antisense oligonucleotide of embodiment 1 to 3, wherein the oligonucleotide is capable of hybridizing to a target nucleic acid selected from the group consisting of SEQ ID NO: 1 to 8 with a ΔG° below-10 kcal.

[0370] 11. The antisense oligonucleotide of embodiment 9 or 10, wherein the target nucleic acid is

[0371] RNA.

[0372] 12. The antisense oligonucleotide of embodiment 11, wherein the RNA is mRNA.

[0373] 13. The antisense oligonucleotide of embodiment 12, wherein the mRNA is pre-RNA or mature RNA.

[0374] 14. The antisense oligonucleotide of any one of embodiments 1-13, wherein the contiguous nucleotide sequence comprises or consists of at least 10 contiguous nucleotides, particularly 11, 12, 13, 14, 15, 16, 17, 18, 19, 20, 21, 22, 23, 24, 25, 26, 27, 28, or 29 contiguous nucleotides.

[0375] 15. The antisense oligonucleotide of any one of embodiments 1-13, wherein the contiguous nucleotide sequence comprises or consists of from 12 to 22 nucleotides.

[0376] 16. The antisense oligonucleotide of any one of embodiments 1 to 15, wherein the contiguous nucleotide sequence comprises or consists of from 12-18 nucleotides.

[0377] 17. The antisense oligonucleotide of any one of embodiments 1 to -16, wherein the antisense oligonucleotide comprises or consists of 10 to 35 nucleotides in length.

[0378] 18. The antisense oligonucleotide of any one of embodiments 1 to 17, wherein the antisense oligonucleotide comprises or consists of 11 to 22 nucleotides in length.

[0379] 19. The antisense oligonucleotide of any one of embodiments 17 to 19, wherein the oligonucleotide comprises or consists of 12 to 18 nucleotides in length.

[0380] 20. The antisense oligonucleotide of any one of embodiments 1-19, wherein the oligonucleotide or contiguous nucleotide sequence is single stranded.

[0381] 21. The antisense oligonucleotide of any one of embodiments 1-20 wherein the oligonucleotide is not siRNA nor self-complementary.

[0382] 22. The antisense oligonucleotide of embodiment 1-21, wherein the contiguous nucleotide sequence comprises or consists of a sequence selected from SEQ ID NO: 11, 12, 13, 14, 15, 16, 17 and 18.

[0383] 23. The antisense oligonucleotide of any one of embodiments 1-22, wherein the contiguous nucleotide sequence has zero to three mismatches compared to the target nucleic acid it is complementary to.

[0384] 24. The antisense oligonucleotide of embodiment 23, wherein the contiguous nucleotide sequence has one mismatch compared to the target nucleic acid.

[0385] 25. The antisense oligonucleotide of embodiment 23, wherein the contiguous nucleotide sequence has two mismatches compared to the target nucleic acid.

[0386] 26. The antisense oligonucleotide of embodiment 23, wherein the contiguous nucleotide sequence is fully complementary to the target nucleic acid sequence.

[0387] 27. The antisense oligonucleotide of embodiment 1-26, comprising one or more modified nucleosides.

[0388] 28. The antisense oligonucleotide of embodiment 27, wherein the one or more modified nucleoside is a high-affinity modified nucleosides.

[0389] 29. The antisense oligonucleotide of embodiment 27 or 28, wherein the one or more modified nucleoside is a 2′ sugar modified nucleoside.

[0390] 30. The antisense oligonucleotide of embodiment 29, wherein the one or more 2′ sugar modified nucleoside is independently selected from the group consisting of 2′-O-alkyl-RNA, 2′-O-methyl-RNA, 2′-alkoxy-RNA, 2′-O-methoxyethyl-RNA, 2′-amino-DNA, 2′-fluoro-DNA, 2′-fluoro-ANA and LNA nucleosides.

[0391] 31. The antisense oligonucleotide of embodiments 27 to 30, wherein the one or more modified nucleoside is a LNA nucleoside.

[0392] 32. The antisense oligonucleotide of embodiment 31, wherein the modified LNA nucleoside is oxy-LNA.

[0393] 33. The antisense oligonucleotide of embodiment 32, wherein the modified nucleoside is beta-D-oxy-LNA.

[0394] 34. The antisense oligonucleotide of embodiment 31, wherein the modified nucleoside is thio-LNA.

[0395] 35. The antisense oligonucleotide of embodiment 31, wherein the modified nucleoside is amino-LNA.

[0396] 36. The antisense oligonucleotide of embodiment 31, wherein the modified nucleoside is cET.

[0397] 37. The antisense oligonucleotide of embodiment 31, wherein the modified nucleoside is ENA.

[0398] 38. The antisense oligonucleotide of embodiment 31, wherein the modified LNA nucleoside is selected from beta-D-oxy-LNA, alpha-L-oxy-LNA, beta-D-amino-LNA, alpha-L-amino-LNA, beta-D-thio-LNA, alpha-L-thio-LNA, (S)cET, (R)cET beta-D-ENA and alpha-L-ENA.

[0399] 39. The antisense oligonucleotide of any one of embodiments 1-38, wherein the oligonucleotide comprises at least one modified internucleoside linkage.

[0400] 40. The antisense oligonucleotide of embodiment 39, wherein the modified internucleoside linkage is nuclease resistant.

[0401] 41. The antisense oligonucleotide of embodiment 39 or 40, wherein at least 50% of the internucleoside linkages within the contiguous nucleotide sequence are phosphorothioate internucleoside linkages or boranophosphate internucleoside linkages.

[0402] 42. The antisense oligonucleotide of embodiment 39 or 40, wherein all the internucleoside linkages within the contiguous nucleotide sequence are phosphorothioate internucleoside linkages.

[0403] 43. The antisense oligonucleotide of embodiment 1-42, wherein the antisense oligonucleotide is capable of recruiting RNase H.

[0404] 44. The antisense oligonucleotide of embodiment 43, wherein the antisense oligonucleotide or contiguous nucleotide sequence thereof comprises a gapmer.

[0405] 45. The antisense oligonucleotide of embodiment 43 or 44, wherein the antisense oligonucleotide or contiguous nucleotide sequence thereof consists of or comprises a gapmer of formula 5′-F-G-F′-3′, where region F and F′ independently comprise or consist of 1-7 modified nucleosides and G is a region between 6 and 17 nucleosides which are capable of recruiting RNaseH, such as a region comprising 6 to 17 DNA nucleosides

[0406] 46. The antisense oligonucleotide of embodiment 45, wherein the modified nucleoside is a 2′ sugar modified nucleoside independently selected from the group consisting of 2′-O-alkyl-RNA, 2′-O-methyl-RNA, 2′-alkoxy-RNA, 2′-O-methoxyethyl-RNA, 2′-amino-DNA, 2′-fluoro-DNA, arabino nucleic acid (ANA), 2′-fluoro-ANA and LNA nucleosides.

[0407] 47. The antisense oligonucleotide of embodiment 45 or 46, wherein one or more of the modified nucleosides in region F and F′ is a LNA nucleoside.

[0408] 48. The antisense oligonucleotide of embodiment 47, wherein all the modified nucleosides in region F and F′ are LNA nucleosides.

[0409] 49. The antisense oligonucleotide of embodiment 48, wherein region F and F′ consist of LNA nucleosides.

[0410] 50. The antisense oligonucleotide of embodiment 47-49, wherein all the modified nucleosides in region F and F′ are oxy-LNA nucleosides.

[0411] 51. The antisense oligonucleotide of embodiment 47, wherein at least one of region F or F′ further comprises at least one 2′ substituted modified nucleoside independently selected from the group consisting of 2′-O-alkyl-RNA, 2′-O-methyl-RNA, 2′-alkoxy-RNA, 2′-O-methoxyethyl-RNA, 2′-amino-DNA and 2′-fluoro-DNA.

[0412] 52. The antisense oligonucleotide of embodiment 47-51, wherein the RNaseH recruiting nucleosides in region G are independently selected from DNA, alpha-L-LNA, C4′ alkylated DNA, ANA and 2′F-ANA and UNA.

[0413] 53. The antisense oligonucleotide of embodiment 52, wherein the nucleosides in region G is

[0414] DNA and/or alpha-L-LNA nucleosides.

[0415] 54. The antisense oligonucleotide of embodiment 52 or 53, wherein region G consists of at least 75% DNA nucleosides.

[0416] 55. The antisense oligonucleotide according to any one of embodiments 1 to 54, wherein wherein the antisense oligonucleotide, or contiguous nucleotide sequence thereof is selected from the group consisting of GaatttgctagtggtggtGG; GCTagtggtggtGG; AATttgctagtggtgGTG; ATTTgctagtggtgGT; TTatttctacagtttccAGA; ATTTctacagtttccAGA; CTacagtttcCAGA; and ATTTctacagtttCCA; wherein capital letters represent LNA nucleosides, such as beta-D-oxy LNA nucleosides, lower case letters represent DNA nucleosides, opionally, all LNA C are 5-methyl cytosine, and all internucleoside linkages are phosphorothioate internucleoside linkages.

[0417] 56. The oligonucleotide of embodiment 55, wherein the oligonucleotide is selected from CMP ID NO:11_1; 12_1; 13_1; 14_1; 15_1; 16_1; 17_1 and 18_1.

[0418] 57. A conjugate comprising the antisense oligonucleotide according to any one of claims 1-56, and at least one conjugate moiety covalently attached to said oligonucleotide.

[0419] 58. The antisense oligonucleotide conjugate of embodiment 57, wherein the conjugate moiety is selected from carbohydrates, cell surface receptor ligands, drug substances, hormones, lipophilic substances, polymers, proteins, peptides, toxins, vitamins, viral proteins or combinations thereof.

[0420] 59. The antisense oligonucleotide conjugate of embodiment 57 or 58, wherein the conjugate moiety is capable of binding to the asialoglycoprotein receptor.

[0421] 60. The antisense oligonucleotide conjugate of any one of embodiments 57-59, comprising a linker which is positioned between the antisense oligonucleotide and the conjugate moiety.

[0422] 61. The antisense oligonucleotide conjugate of embodiment 60, wherein the linker is a physiologically labile linker.

[0423] 62. The antisense oligonucleotide conjugate of embodiment 61, wherein the physiologically labile linker is nuclease susceptible linker.

[0424] 63. The antisense oligonucleotide conjugate of embodiment 61 or 62, wherein the oligonucleotide has the formula D′-F-G-F′ or F-G-F′-D″, wherein F, F′ and G are as defined in embodiments 47-56 and D′ or D″ comprises 1, 2 or 3 DNA nucleosides with phosphorothioate internucleoside linkages.

[0425] 64. A pharmaceutically acceptable salt of the antisense oligonucleotide according to any one of embodiments 1-56 or the conjugate according to any of embodiments 57 to 63.

[0426] 65. A pharmaceutical composition comprising the antisense oligonucleotide of embodiment 1-56 or a conjugate of embodiment 57-63 and a pharmaceutically acceptable diluent, carrier, salt and/or adjuvant.

[0427] 66. A method for manufacturing the antisense oligonucleotide of any one of embodiments 1-56, comprising reacting nucleotide units thereby forming covalently linked contiguous nucleotide units comprised in the oligonucleotide.

[0428] 67. The method of embodiment 66, further comprising reacting the contiguous nucleotide sequence with a non-nucleotide conjugation moiety.

[0429] 68. A method for manufacturing the composition of embodiment 65, comprising mixing the oligonucleotide with a pharmaceutically acceptable diluent, carrier, salt and/or adjuvant.

[0430] 69. An in vivo or in vitro method for reducing FNDC3B expression in a target cell which is expressing the mammalianFNDC3B, said method comprising administering an antisense oligonucleotide of embodiments 1-56 or a conjugate of embodiments 57-63 or the pharmaceutically acceptable salt of embodiment 64 or the pharmaceutical composition of embodiment 65 in an effective amount to said cell.

[0431] 70. A method for treating, alleviating or preventing a disease comprising administering a therapeutically or prophylactically effective amount of an antisense oligonucleotide of embodiments 1-56 or a conjugate of embodiments 57-63 or the pharmaceutically acceptable salt of embodiment 64 or the pharmaceutical composition of embodiment 65 to a subject suffering from or susceptible to the disease.

[0432] 71. The antisense oligonucleotide of embodiments 1-56 or a conjugate of embodiments 57-63 or the pharmaceutically acceptable salt of embodiment 64 or the pharmaceutical composition of embodiment 65, for use as a medicament for treatment, alleviation or prevention of a disease in a subject.

[0433] 72. Use of the antisense oligonucleotide of embodiments 1-56 or a conjugate of embodiments 57-63 or the pharmaceutically acceptable salt of embodiment 64 for the preparation of a medicament for treatment, alleviation or prevention of a disease in a subject.

[0434] 73. The method, the antisense oligonucleotide or the use of embodiments 70-72, wherein the disease is associated with in vivo activity of FNDC3B.

[0435] 74. The method, the antisense oligonucleotide or the use of embodiments 70-73, wherein the disease is associated with overexpression of FNDC3B gene and/or abnormal levels of FNDC3B protein.

[0436] 75. The method, the antisense oligonucleotide or the use of embodiment 74, wherein the FNDC3B gene expression is reduced by at least 30%, or at least or at least 40%, or at least 50%, or at least 60%, or at least 70%, or at least 80%, or at least 90%, or at least 95% compared to the expression without the oligonucleotide of embodiments 1-56 or a conjugate of embodiment 57-63 or the pharmaceutically acceptable salt of embodiment 64 or the pharmaceutical composition of embodiment 65.

[0437] 76. The method, the antisense oligonucleotide or the use of embodiments 70-74, wherein the disease is cancer, selected from acute myeloid leukemia and hepatocellular carcinoma.

[0438] 77. The method, the antisense oligonucleotide or the use of embodiments 70-76, wherein the subject is a mammal.

[0439] 78. The method, the antisense oligonucleotide or the use of embodiment 77, wherein the mammal is human.

### Examples

[0440] Materials and methods

TABLE 4
list of oligonucleotide motif sequences (indicated by SEQ ID NO), designs of these,
as well as specific oligonucleotide compounds (indicated by CMP ID NO) designed
based on the motif sequence.

| SEQ | | | | CMP | |
|---|---|---|---|---|---|
| ID | | | Oligonucleotide | ID | Start position |
| NO | Motif sequence | Design | Compound | NO | on SEQ ID NO: 1* |
| 11 | GAATTTGCTAGTGGTGGTGG | 1-17-2 | GaatttgctagtggtggtGG | 11_1 | 54366, 54407, |
| | | | | | 54448, 54489, |
| | | | | | 54530, 54571, |
| | | | | | 54612 |
| 12 | GCTAGTGGTGGTGG | 3-9-2 | GCTagtggtggtGG | 12_1 | 54366, 54407, |
| | | | | | 54448, 54489, |
| | | | | | 54530, 54571, |
| | | | | | 54612 |
| 13 | AATTTGCTAGTGGTGGTG | 3-12-3 | AATttgctagtggtgGTG | 13_1 | 54367, 54408, |
| | | | | | 54449, 54490, |
| | | | | | 54531, 54572, |
| | | | | | 54613 |
| 14 | ATTTGCTAGTGGTGGT | 4-10-2 | ATTTgctagtggtgGT | 14_1 | 54368, 54409, |
| | | | | | 54450, 54491, |
| | | | | | 54532, 54573, |
| | | | | | 54614 |
| 15 | TTATTTCTACAGTTTCCAGA | 2-15-3 | TTatttctacagtttccAGA | 15_1 | 351016 |
| 16 | ATTTCTACAGTTTCCAGA | 4-11-3 | ATTTctacagtttccAGA | 16_1 | 351016 |
| 17 | CTACAGTTTCCAGA | 2-8-4 | CTacagtttcCAGA | 17_1 | 351016 |
| 18 | ATTTCTACAGTTTCCA | 4-9-3 | ATTTctacagtttCCA | 18_1 | 351018 |

*multiple numbers refers to repeat targeting compounds

[0441] Motif sequences represent the contiguous sequence of nucleobases present in the oligonucleotide.

[0442] Designs refer to the gapmer design, F-G-F′, where each number represents the number of consecutive modified nucleosides, e.g. 2′ sugar modified nucleosides (first number=5′ flank), followed by the number of DNA nucleosides (second number=gap region), followed by the number of modified nucleosides, e.g. 2′ sugar modified nucleosides (third number=3′ flank), optionally preceded by or followed by further repeated regions of DNA and LNA, which are not necessarily part of the contiguous sequence that is complementary to the target nucleic acid.

[0443] Oligonucleotide compounds represent specific designs of a motif sequence. Capital letters represent beta-D-oxy LNA nucleosides, lowercase letters represent DNA nucleosides, all LNA C are 5-methyl cytosine, and 5-methyl DNA cytosines are presented by “e”, all internucleoside linkages are phosphorothioate internucleoside linkages.

[0444] Oligonucleotide Synthesis

[0445] Oligonucleotide synthesis is generally known in the art. Below is a protocol which may be applied. The oligonucleotides of the present invention may have been produced by slightly varying methods in terms of apparatus, support and concentrations used.

[0446] Oligonucleotides are synthesized on uridine universal supports using the phosphoramidite approach on an Oligomaker 48 at 1 μmol scale. At the end of the synthesis, the oligonucleotides are cleaved from the solid support using aqueous ammonia for 5-16 hours at 60° C. The oligonucleotides are purified by reverse phase HPLC (RP-HPLC) or by solid phase extractions and characterized by UPLC, and the molecular mass is further confirmed by ESI-MS.

[0447] Elongation of the Oligonucleotide:

[0448] The coupling of β-cyanoethyl-phosphoramidites (DNA-A(Bz), DNA-G(ibu), DNA-C(Bz), DNA-T, LNA-5-methyl-C(Bz), LNA-A(Bz), LNA-G(dmf), or LNA-T) is performed by using a solution of 0.1 M of the 5′-O-DMT-protected amidite in acetonitrile and DCI (4,5-dicyanoimidazole) in acetonitrile (0.25 M) as activator. For the final cycle a phosphoramidite with desired modifications can be used, e.g. a C6 linker for attaching a conjugate group or a conjugate group as such. Thiolation for introduction of phosphorthioate linkages is carried out by using xanthane hydride (0.01 M in acetonitrile/pyridine 9:1). Phosphordiester linkages can be introduced using 0.02 M iodine in THF/Pyridine/water 7:2:1. The rest of the reagents are the ones typically used for oligonucleotide synthesis.

[0449] For post solid phase synthesis conjugation a commercially available C6 aminolinker phorphoramidite can be used in the last cycle of the solid phase synthesis and after deprotection and cleavage from the solid support the aminolinked deprotected oligonucleotide is isolated. The conjugates are introduced via activation of the functional group using standard synthesis methods.

[0450] Purification by RP-HPLC:

[0451] The crude compounds are purified by preparative RP-HPLC on a Phenomenex Jupiter C18 10μ150×10 mm column. 0.1 M ammonium acetate pH 8 and acetonitrile is used as buffers at a flow rate of 5 mL/min. The collected fractions are lyophilized to give the purified compound typically as a white solid.

### Abbreviations

[0452] DCI: 4,5-Dicyanoimidazole

[0453] DCM: Dichloromethane

[0454] DMF: Dimethylformamide

[0455] DMT: 4,4′-Dimethoxytrityl

[0456] THF: Tetrahydrofurane

[0457] Bz: Benzoyl

[0458] Ibu: Isobutyryl

[0459] RP-HPLC: Reverse phase high performance liquid chromatography

[0460] Tₘ Assay:

[0461] Oligonucleotide and RNA target (phosphate linked, PO) duplexes are diluted to 3 mM in 500 ml RNase-free water and mixed with 500 ml 2×Tₘ-buffer (200 mM NaCl, 0.2 mM EDTA, 20 mM Naphosphate, pH 7.0). The solution is heated to 95° C. for 3 min and then allowed to anneal in room temperature for 30 min. The duplex melting temperatures (Tₘ) is measured on a Lambda 40 UV/VIS Spectrophotometer equipped with a Peltier temperature programmer PTP6 using PE Templab software (Perkin Elmer). The temperature is ramped up from 20° C. to 95° C. and then down to 25° C., recording absorption at 260 nm. First derivative and the local maximums of both the melting and annealing are used to assess the duplex Tₘ.

### Example 1—Testing In Vitro Efficacy and Potency

[0462] Oligonucleotides targeting one region as well as oligonucleotides targeting at least two target regions being identical to each other on FNDC3B (SEQ ID NO: 1) were tested in an in vitro experiment in HeLa cells. EC50 (potency) and max kd (efficacy) was assessed for the single targeting and repeat targeting oligonucleotides.

[0463] Cell Lines

[0464] The HeLa cell line was purchased from European Collection of Authenticated Cell Cultures (ECACC) and maintained as recommended by the supplier in a humidified incubator at 37° C. with 5% CO₂. For assays, 2500 cells/well were seeded in a 96 multi well plate in Eagle's Minimum Essential Medium (Sigma, M4655) with 10% fetal bovine serum (FBS) as recommended by the supplier.

[0465] Oligonucleotide Potency and Efficacy

[0466] Cells were incubated for 24 hours before addition of oligonucleotides. The oligonucleotides were dissolved in PBS and added to the cells at final concentrations of oligonucleotides was of 0.01, 0.031, 0.1, 0.31, 1, 3.21, 10, and 32.1 μM, the final culture volume was 100 μl/well. The cells were harvested 3 days after addition of oligonucleotide compounds and total RNA was extracted using the PureLink Pro 96 RNA Purification kit (Thermo Fisher Scientific), according to the manufacturer's instructions. Target transcript levels were quantified using FAM labeled TaqMan assays from Thermo Fisher Scientific in a multiplex reaction with a VIC labelled GAPDH control probe in a technical duplex and biological triplex set up. TaqMan primer assays for the target transcript of interest FNDC3B (Hs00981550_m1) and a house keeping gene GAPDH (4326317E VIC®/MGB probe). EC50 and efficacy of the oligonucleotides are shown in table 5 as % of control sample.

[0467] EC50 calculations were performed in GraphPad Prism6. The maximum FNDC3B knock down level is shown in table 5 as % of control.

TABLE 5
EC50 and maximal knock down (Max Kd) % of control

| CMP ID | | | Max | | |
|---|---|---|---|---|---|
| NO | EC50 | Std | kd | std | Start position(s) on SEQ ID NO: 1 |
| 11_1 | 3.33 | 0.74 | 44.50 | 4.67 | 54366, 54407, 54448, 54489, |
| | | | | | 54530, 54571, 54612 |
| 12_1 | 1.28 | 0.33 | 45.95 | 4.35 | 54366, 54407, 54448, 54489, |
| | | | | | 54530, 54571, 54612 |
| 13_1 | 0.52 | 0.03 | 8.95 | 1.10 | 54367, 54408, 54449, 54490, |
| | | | | | 54531, 54572, 54613 |
| 14_1 | 0.40 | 0.04 | 0.00 | 2.03 | 54368, 54409, 54450, 54491, |
| | | | | | 54532, 54573, 54614 |
| 15_1 | 95.92 | 473.37 | 0.00 | 98.74 | 351016 |
| 16_1 | 10.77 | 22.78 | 0.00 | 42.83 | 351016 |
| 17_1 | 10.12 | 8.99 | 78.71 | 8.22 | 351016 |
| 18_1 | 1.13 | 0.08 | 41.12 | 1.15 | 351018 |

1. An antisense oligonucleotide of 10 to 50 nucleotides in length,
which comprises a contiguous nucleotide sequence of 10 to 30 nucleotides in length which is at least 90% complementary, including fully complementary, to a mammalian FNDC3B encoding target nucleic acid, wherein the antisense oligonucleotide is capable of reducing the expression of the mammalian FNDC3B encoding target nucleic acid in a cell.

2. The antisense oligonucleotide according to claim 1, wherein the contiguous nucleotide sequence is at least 90% complementary, such as fully complementary to a sequence selected from the group consisting of SEQ ID NO: 1, 2, 3, 4, 5, 6, 7 and 8, or a naturally occurring variant thereof.

3. The antisense oligonucleotide according to claim 1, wherein the contiguous nucleotide sequence is fully complementary to the mammalian FNDC3B encoding target nucleic acid.

4. The antisense oligonucleotide according to claim 1, wherein the contiguous nucleotide sequence is at least 90% complementary, such as fully complementary, to an intron region present in the pre-mRNA of mammalian FNDC3B encoding target nucleic acid (e.g. SEQ ID NO: 1).

5. The antisense oligonucleotide according to claim 1, wherein the contiguous nucleotide sequence is at least 90% complementary, such as fully complementary, to an intron region present in the pre-mRNA of human FNDC3B, selected from position 145-72824 on SEQ ID NO: 1, position 72964-93844 on SEQ ID NO: 1, and position 93920-147084 on SEQ ID NO: 1.

6. The antisense oligonucleotide according to claim 1, wherein the contiguous nucleotide sequence is at least 90% complementary, such as fully complementary, to nucleotides 145-72824 of the human pre-mRNA of mammalian FNDC3B encoding target nucleic acid of SEQ ID NO: 1.

7. The antisense oligonucleotide according to claim 1, wherein the contiguous nucleotide sequence is at least 90% complementary, such as fully complementary, to SEQ ID NO: 9, 10, 19 or 20.

8. The antisense oligonucleotide according to claim 1, wherein the contiguous nucleotide sequence is at least 90% complementary, such as fully complementary, to a target region of SEQ ID NO 1, selected from the group consisting of position 54366-54385, 54407-54426, 54448-54467, 54489-54508, 54530-54549, 54571-54590, 54612-54631; 54367-54384, 54408-54425, 54449-54466, 54490-54507, 54531-54548, 54572-54589, 54613-54630; 54368-54383, 54409-54424, 54450-54465, 54491-54506, 54532-54547, 54573-54588, 54614-54629; 54366-54379, 54407-54420, 54448-54461, 54489-54502, 54530-54543, 54571-54584, 54612-54625; 351016-351033; 351016-351029; 351016-351035; and 351018-35133 of SEQ ID NO: 1.

9. The antisense oligonucleotide according to claim 1, wherein the contiguous nucleotide sequence is at least 90% complementary, such as fully complementary, to a target region of 10-22, such as 14-20, nucleotides in length of the target nucleic acid of SEQ ID NO: 1, wherein the target region is repeated at least 2 times across the target nucleic acid.

10. The antisense oligonucleotide according to claim 1, wherein the contiguous nucleotide sequence is at least 90% identical, such as is 100% identical to a sequence selected from the group consisting of SEQ ID NO 11, 12, 13, 14, 15, 16, 17 and 18.

11. The antisense oligonucleotide according to claim 1, wherein the contiguous nucleotide sequence consists of a sequence selected from the group consisting of SEQ ID NO 11, 12, 13, 14, 15, 16, 17 and 18.

12. The antisense oligonucleotide of claim 1, wherein the contiguous nucleotide sequence comprises one or more 2′ sugar modified nucleosides.

13. The antisense oligonucleotide of claim 12, wherein the one or more 2′ sugar modified nucleoside is independently selected from the group consisting of 2′-O-alkyl-RNA, 2′-O-methyl-RNA, 2′-alkoxy-RNA, 2′-O-methoxyethyl-RNA, 2′-amino-DNA, 2′-fluoro-DNA, arabino nucleic acid (ANA), 2′-fluoro-ANA and LNA nucleosides.

14. The antisense oligonucleotide of claim 12, wherein the one or more modified nucleoside is a LNA nucleoside.

15. The antisense oligonucleotide of claim 1, wherein the contiguous nucleotide sequence comprises at least one modified internucleoside linkage.

16. The antisense oligonucleotide of claim 1, wherein at least 50%, such as at least 75%, such as at least 90%, such as all of the internucleoside linkages within the contiguous nucleotide sequence are phosphorothioate internucleoside linkages.

17. The antisense oligonucleotide of claim 1, wherein the antisense oligonucleotide is capable of recruiting RNase H.

18. The antisense oligonucleotide of claim 1, wherein the antisense oligonucleotide, or contiguous nucleotide sequence thereof, consists or comprises of a gapmer of formula 5′-F-G-F′-3′, where region F and F′ independently comprise 1-8 nucleosides, of which 1-5 are 2′ sugar modified nucleosides and defines the 5′ and 3′ end of the F and F′ region, and G is a region between 6 and 17 nucleosides which are capable of recruiting RNaseH, such as a region comprising 6-17 DNA nucleosides.

19. The antisense oligonucleotide of claim 1, wherein the antisense oligonucleotide, or contiguous nucleotide sequence thereof is selected from the group consisting of GaatttgctagtggtggtGG (Compound ID 11_1); GCTagtggtggtGG (Compound ID 12_1); AATttgctagtggtgGTG (Compound ID 13_1); ATTTgctagtggtgGT (Compound ID 14_1); TTatttctacagtttccAGA (Compound ID 15_1); ATTTctacagtttccAGA (Compound ID 16_1); CTacagtttcCAGA (Compound ID 17_1); and ATTTctacagtttCCA (Compound ID 18_1); wherein capital letters represent LNA nucleosides, such as beta-D-oxy LNA nucleosides, lower case letters represent DNA nucleosides, optionally, all LNA C are 5-methyl cytosine, and all internucleoside linkages are phosphorothioate internucleoside linkages.

20. A conjugate comprising the antisense oligonucleotide according to claim 1, and at least one conjugate moiety covalently attached to said oligonucleotide.

21. A pharmaceutically acceptable salt of the antisense oligonucleotide according to claim 1.

22. A pharmaceutical composition comprising the antisense oligonucleotide of claim 1, and a pharmaceutically acceptable diluent, solvent, carrier, salt and/or adjuvant.

23. An in vivo or in vitro method for inhibiting a mammalian FNDC3B expression in a target cell which is expressing the mammalian FNDC3B, said method comprising administering an antisense oligonucleotide of claim 1 in an effective amount to said cell.

24. A method for treating or preventing a disease comprising administering a therapeutically or prophylactically effective amount of an oligonucleotide of claim 1 to a subject suffering from or susceptible to the disease.

25. The method of claim 24, wherein the disease is selected from the group consisting of cancer, such as acute myeloid leukemia, or hepatocellular carcinoma.

26. The antisense oligonucleotide of claim 1 for use in medicine.

27. The antisense oligonucleotide of claim 1 for use in the treatment or prevention of cancer, such as hepatocellular carcinoma or acute myeloid leukemia.

28. Use of the antisense oligonucleotide of claim 1, for the preparation of a medicament for treatment or prevention of cancer, such as hepatocellular carcinoma or acute myeloid leukemia.

The application's sequence listing, which the Patent Office published only in electronic form, follows.

SEQUENCE LISTING (20 sequences)

SEQ ID NO: 1 - DNA, 362038 bp, homo sapiens
gcggcggcggcggctggaggaggagagcggcggcggcgggagcagcgaagggggcggcagggatcctccaggctgccggctgggaaggcgtgggcgacccggtgtgtggcgcgcccagagccccgcgtttcagccctagggaaggtaaggcgtgcaagagccggggactagaggagaccgggaccccgagcgcgatcgccgggtcccggtgcactggaaagccccggcctgacgccgagtccgccaaagtgcgtccctgtcccgggagcgccctgggcttcccggcaaaaacttggcgccggagtgctggggcgccccgtgctcgcctgggcaccccgggaacacgggacccgggagggggcggcccccgccttgctgggctggggtcccccgcctgtgccccctgcctcagggtttggaggagtgaaagaaacgggtagattcctcttaaaaaaaattgggcagtggctcgcggcctccccccacccccagccttcccagcagattttgtccgaggaatccgctccccctcccggaatctccgcggcaggaacgctgcccaggagggggagggcgggcggcgaggccgaggaatcttcgacgtgtcactttctgaggctgtagatttccatatggtggagggaagagggcgggagtgcgaagtggggctggaagttggggccgcctctccgcgccggcgggggcggtcgggggcctcgaacccggggatgctcgcggggagggtcccgagcccgcgccggcctggcccccccgtccccggctgggcctctccgggacactccccgccccgctgctggccacctccgagcacgccacgtcctcctccccgtcctgccccccgggctccccccgggctgggggcggtaaccggcggccgcggccggacttggcgagccggcggctggaagctcgggcgggggagcggggcgcggcgggaaggagcgggcgacccggtgtgtgggccagcggagctccggtcagtcggtcaccccgaggggcgcctcggccggggatagggcgggcgggcggaatctgcgccccgaggcggccaggaggggccgcgcggaccgtctggtgcccgcggctgggctggggccggcaggcgtgggaagggcctgtcactctcggcagaaagtggggcctcgggctgtgcccgcgaactttcccagaggtccgggtcccggcgtcccgtgggaaccggaggacccgggcccgccgtctcgggagactgggctgcgccgcccggcggcgcctttggcggggaggcttccaggagtgcgcggtcggagttggagcttttggaatctcagctcccaccctgccatcccagacgaagggaagcaatggcattttatccagacagtgccgtttgcagacttccttaaaagttataactttttgttttcttttctcctcaacccagcattttatttaaacaaaatttagaatttggccgcaatgggccaacgctggggccaaaaatccacaggtttctctctccatccctgctggtttctagtcccccctccccctcttccctcccaggcttaatcatattttggaacgggtgaggtcttttgttgggtgggcaccccctgattgcttgtctgtttattttttaatgtgcaactaatttgatttgaatttccttcagtttccaggccttcctagggaaagctaagggagagggaatatgctttttaaaaatcgttttctttctttctttctttctttctttttctttctttctttctccttctctctccttccttccttccttccttccttccttccttccttccttctcttctcctcctcctccttcttgttcttgttcttcttcttttttttttttttaaataaatgtggcaggaggtggggcgttgggaatggggaggcacggtggttgtgggcaaagagtcagaaggagcagacagacccggaagaaaaggaatctgctctggaataacactttttttttgaggcctcaggccttgggcaaaattgcttcgctctgtaatgatttctgctgccggagttgctcctccacccctaagttaaagctatgaacctgggtgcccgggcaacgccccacagtggatagcagccgggagcgctggttttgtgccttttgtgggggcccttggttccccctcattggaggctgactctgaaatttactggatcagtaaatttcctggctccctgggagcagctgttaacgaggataaagtctctgggcatgtttctggccctgcaaaaggacctcacccatgaaggtacaattctcactttgtttagataccagaggggcacccacaggctggctgagaatgaggcatagttgattaaaaaaaaaatcagtcattacaaaattgtttttaaactcacacgtgcttttaaagtgttgtggtttaaattactttaagataaaaaaaattcatctgtaaggatagcgttcatttaaaagatgctaaaactgcaggatctcatcatgaaataggaggttgtagcttctaattacagtatatacaatttcagaaagatattccggtaatcttttaatacagactttataaatagctcacatcagacgatgggttatattggagagccagtcttctgcggtttcttgaagaatgcttgggatctgtgaggaagctctaggcccttggaggctaggtagcagttcactcagtaggagtttgtgctccttttgctcagtatttaacctggtagcatttgatggataagttcattaggagctaagtagaagaacttaccacacttgtcagtttggaaaatgaggcccgggaagggaaagtgacttgttgagggtcaccattatagacgaaagtttaatacaggattgtgttaatagctcctttctgggatatctgatgtgtactaagcactaattcctgtgcttttatacattatctcattaaaattctagtattttcgatttaggttgtgttatgcacactttacaaacaaggggattgagatttacagagagagagtaacttgcataagatcacgtagctaccaatggtgtcatccaatggaattttcttcagtgttggaaatggttctgtctgtgctgtccagcatagcagccacaagccacatgtaactgagtctttgaaatgtagctagtggactgaggaacaacagtttaagtttttttttttttttttgaaatggagtctcgctctgtcgcccaggctggagtgagtgcagtggcgcaatctcggctcactgcaacctccgccttgctggttgagatggattctcgctctgtagcccaggctggagtgcagtggcgcggtctcggctaactgcaacctccgcctcccggattcaagcgattctcctgccttagcctcccgagtagctgggattacaggcgcttgccaccacgcccggctaattttttgtattttttagtagagacgggttttcaccatgttagccaggctggtcacgaactcctgacttcaggtgatccacccgcctcgggctcccagagtgctggaattacaggcgtgagccaccacacccggactaagttttatttacttgtaattattttaaacttaaatttccacttgtggctagtggttaccatattggagagcaaagtgtagaactttttgactcccaaatctttcacatgtagcttggtcatattgctctttattttactttgagacagactctcgctctgttaccccggctggagtgcagcggcatgatcactggctcactcactgtagcctccacctcccaggctgaagtgatcctctccccttagcctctccagtagctggtactacaggtgtgcacgccaccatgccaggctatttattattattattgtttttttgtagagacaggtctcactaggttgtccaggctgcatactgctctttagatctcttagttcatttttctttcttctacgatatcagaagttacattcagcccttaaatggaatttaaagactgagttagctatagctcaactttgctttcatatgtagagtggataaaatacgcacattatttgttaactctttggttttaaaaacaatgtttacatgtcatagttaaaactggtggaaaaatctttaaattgtatcttttttggtttaatataggaattgtgcataggaattgctgaaaaagtagtcagaacttgttggttattttagtgtaataagagtacaaataggaagcaatatgaaaagtcactaatagaaagctgaaaaaaacgatcctctcatacccgcgtccatccgttcattggacagttcttttcagactttgtaagtatcagtaaaccattactcacttttccttatgtagctgcagaagtaacctgaagaattaaaattattcttttactctcagtgtatagaaatcaaatatcaaacacattggattcatccatgaattgggaagaatatgtgtaagattaaaacagtaagaaagatctgtccgatggcagatgttcaaatcattttctgattagtggatttaatttaaattcattgaattttagagtttcatttgctaaaaggaatttcaacaactttctgattttgtatggaatagtgaaaattccaactctttttttttttttttttttggtgtgctaccctcaggaaaaggcaaattataatgtaatctctttttattaggatttttaagaggcaactgccaggttcagtataaatatatctgaatctattgtatcttccatagttatggtactgtcctgggataattgcagttcatagtcttaactctagacatatcctggaggacctatgtctgtaaattatctttgaattgttctatgttattttagtgttatgtgaattacattgcttccagctctttgaaaatcgttaattcaactgcaggtaaggcgtcagttactgagactgttcagataactgaaacatcctgttcatacccattcctgaccattgggaccactgtactattttcaaggataagataccactgtactattttcaggataagaaccatgttataaatagaattatagtgtcctagtgagtgtgacaaatataggaaacatgatttaacccatgacatatggtttgatttgtaggacatccccaagtgcttaatacaaatgagaaatgtactataatcttaaggcataaagatgtttaaatgatggacaaaaattgagggccacatctgagcatcagtttgaaatcagaatatctcctctgtcaaggagtgactttactttctagctgggtccttgataagcttttgaatctctctgagtctgggtttcctcattttaatataaggaggaaagatctaactcgtaccttttcaaatggtgtcacaagggattaatgagtcagtgtattgagaagtgtttggcaaagccttatacaaactccatagttcattatattccagagtttaaaactgagctggtgctatggtatttctctgcacattttcagagacctccaaattgtgcttggacagtttgaaaaatgatttatttttctctttgtgatcagtaaacaaggtccaagctttagatgttgtattttattttaccccactcctaatggaataggtgatttgtgacctctgcaaagttgtactatacataagttgtcccatatctgtgtttttgggaagctggtctgtagctgggctagtgttgctgaagtgggcaggccaggcttgattcagggctgtttttgaggtggcgggaaaaagtgcagtctcttagaggaacgttcagtactgaatgataaaggaataaggttttaggccttgtatgttaccttagcctattacttgagctttcagcaattacagctgagaatggaaaagaatcgtattttcagtgtaggggagtctttgcaacctacctgcctttccactttagaaatcacaattgccttttcttcttgttaacgaggttaatccattaagtgggatatttatatggtaagacattattttcaagtaaattaattctcactcttaaggctgttgagaattcacttaggtggttgaggagaagctttgtactttagtttactgagtgtctctctctctctctctctctctctctctatatatatatatacactttgccttaaaatatatattatggttatggcattatgtgttgtaaagagggagagaatgcttgaattattgtggctagataggggcaggtagacaagcacaggcccaactggaaggatgacttgatggtagttgagcactttgcaaggtacctccagtgagatgccagaccctagtaacaagctcacctggaggggagtttgtttgtggtgcaggtttaatgtcaaggaccagttcttggaaacagaaggtatgtggggtgccagttgaagatcaggggacagaaatgtttttaaaaccaccaagtataaatcacataagatcgatagacagtcgtgatcagccatctacatacagatgaggatgtttgtcagtttgaaaatggatcgattgttgaatttttctttgtttctccccagttaagatatgcaagtttagcattctgtaagtgttggatcagaatttctgatgcccttggcactcactactcagtgtcagtttagacattggctcctaattttttttctttttcttttttaagatacagtgtttcactgctgctggagtgcagtggctctatcatagcttactatggcttcgaactcctgggctcaagtgatccttgagtagggctatagctaggactataggttcacgccaccatgcctggctaatgtttttttttttatttttatagagacagggtttcactttgtggctcaggctggtctctaacttctggcttgaagcaatccccccgcttcagcctcccaaaatgttgggattataggttatgagccaccttgcccggccctgttttgtttttataatatcattaaaatacctcatcagtttcaaataaccattttgcagggtggtaggggatttttctgagatggtgttgagtcacagtgttatttgaggttctagtaagtatcaaagtgtgtcttgtgttaaatgattctatttgagcttaaaatgtaatttcatttcagttacttgtttattgactcagaatgcatttgttgagatctagaccaggttctttgttaatggaatgttctactctgttctgatgtttttggaatcttgtatagagaacagtgtctaccaccaaactcctaaggctggatggtggtaagttcaactctttgctaccttctgaaatttgagaaatagtaaaattggagcaccttcaggctgtgttagactttaaggcttctaaattatattagaatgtaaggatacatctttgttttgaccctggaaagagtagtaaagattttcataaaggccaactagtcataaaaacttacttaaattgacatgatcctaactcacaattatgaaaagctttctgttgaaataattgtgtagaaagtgatctttatacatgaacaaaggtgggatgttttagaaataattgaagattctaagatcccaggaaatataatggtttaatttatttttaagggatttaagattccccatagcctatgaaagaggggtctctattaaaaataacgccattgttctagatgtagctaattagggatttgcaattatctaggcaaggctaggataaagtttggctgcctattctgtatgaaaaggttttactgtaaatatcaagtttaaatagatcttaagaggaatatttacctaattaaaagaacaaaccacttttaagcaccttgggaaaatcaatttacttaaaagcagtgtaaaaatgcagaatgcattcactgatgctggtctgctggtggtcttttcatagagatacaggagcccctggaaagtcagtgctctctgtggattgccatgaaataaatattgattgactcaatgctattatgtgaactacaaacagtttaccagcaatgggtagaactatattatttgcttgcaaaatacatcacaacaataaacacaatatctgcctcccccaccccactccactctaccaatagactccaactatgcctatttattggttttggagtttttctattgacatttgttttgctacttgttaacttcttttgtcatgtgtaagcatttgatggcagattggggacagcaggtgttaaaggtttaagagcatcattattgcttttagcttcatttcttctgcctttgtgtttgggcaagattgtggagagtcctgagtttagtatttagataaggtaattacatgtccttctcctctacttttactaaagcaagatcctcctgggcagcttagttccaggtactgtatgaacttgccagtaataagagtaagtttcttttaaaagatttctggatattttacgttttatactcagtcactcagatgcgaggttttctagtatgtgtctacttaggggtcagatttgaccagtttttaacagtacaagttgtacatataggatacttaatgtatttctaggatattatgcttcattttctcttagtattttaaaggttttaaaaaacccattctataccttctatatcttttattgtttaagtcattcaatgggaaagaaaataataaaagtctttagatgctgtttctgatttttcgatcatggtttttttaatctcaagaaaaataattctgattaagaaatagaggtaaacattattctgaagtagtgaattagagaatacttaaatatattgagctggaatccttgtgtattgcatgttgggaatgttaaatgataaagctactgtggaaaacagttctgtagttcataaatatttacacatagaattactatatgattcagcaattccattcctattcctatacgcaaaagaaagcagggactcaggtacttaaaagccagtgtttatagcagcattattgacaatacctaaaaggtagaaacaacccatgcccatcaacagatgaatggataaacaaaatatggtattatatattggaatattttggtacagtggaatattattcagccataaaaaagaaggcagttctaatacatgccataacatgaatgaatcttgaaaacattatgctaagtgaaataagccggacacaagaagataaatattgtatatatccacttgcatgagatgactaggataggtaaattcatagagacaaaaagtagaatagagattaccagggcttgggggaagggaagatggagagatagtgtttcatgggtttagaatttctgtttgggatgataaaaaatttctggaaatgaacagtggcgatggttgtacaacattatgaatgtatgtaatgccactaagttgaatgcagaaaatggtaaattttttgttatgtatattttatgacaattaaaaaatgcaaaagtaaatattgaagatgtatcctacacagtctccatatgcctctttactcccccttggtctgcttcaggcaggtatatagttattttttcttcatctggctgttgcagtgtaaatggagatttccctaggccattttttggagatcagagagtttccttattttattaactgacttaaatttaagaggaaaatgtttaaaagtagatctctggaggggaaaaaagggcattttaatattgagatgaatcagggagtttgttaatattggcagaccatgtaagcacatgaagataatctatcctgaatagcacagcgagtcatttagaaatccagtagtaggtgtacactcggacctgtcacattttctaacctttaaacattgttttttgtttcttttttttgagatagaatttcgctcttattgtccagggtggagtgcaatggcgcgatctcggctcaccctgacctctgcctcccaggttcaagcgattcttctgcctcagtctcccgagtagctgagattacaggcatgcaccaccacccctggctaattttgtatatttagtagagacagggtttctccatgttggtcaggctggtttcaaactcctgacctcaggtgatctgctcgcctctacctcccaaagtcctgggattataggcatgagccaccgtgcctggcctaacctttaaacattttattcattcttgacatcattagtactgtggaaaaactttgatttctgtttaagagaaatggtgtaagtcatctctgtactcatgttggaaatgcattaggtgttagaattctttagttccttagactgtaaaaccaagttacaaaagggatagagtgaaagaaaacacataaattctgttttattcatctgaacttgtctctggcatctaatgattgcatagtaggttctgctccctctgttttttttttgtgaggtatttgatgttgagtatagttggatcatttaccaaaagatgggcaagattttcattaagtgatgggataccaaagcctaaacgtcggatgaaaagtatgtatactcaaaatgtcagataaaaattctaatggaaagatttaaattcaaatgcaggtaagttcttaaggaaaattacataccatttactaccacaaaatgtttaccattcattccagaactcctggaaaacagtgtcagattgcaagggtgtgatagtaatgtgtacatgtactctctgtgggtatattttcttttttttttttaagatggtgtctcactctgtcacccaggctggagtgcagtggcacgatcttggctcactgcaacctccgtctcctgggttcatgtgattctcctgcctcagcctccggagcagctgggattacaggcacgtgccaccatgcctggctaatttttgtgtttttagtagagatagggtttcaccatgttagccagactggtcttgaactcccaacctcaggtgatccacctgcctcagcctcccaaagtgctgggattacaggcatgagccaccacgcccagcctttgtgggtatattttcgtgtgtgtgtgtgtgtgtgtgtgtgtgtgtgtgtatagtgtgtatatatactatatatactctttatatagtgtgtgtgtatatatattgctgtatatataaatggcttgatacaaattccactcaatgagcttttcataccatagctgtcatttttgtggcctactaatttctctggcggtaggatcattacggatatcaaaaggtattgagagtcatggtctcctcatatccaggagtgatacgaagaattattacattgcatttagaatgctcttaaatgattttggcctattcaaaagaaaatgatctccccttttctttgcatatccttgttatgttccagagccatcattttagataacttatcattttctttcttcttttttttttttttttggagatggagtttcactcttgttgcccaggctggagtgcaatggcgcgatctcggctcaccgcaacctctgcctcccggtttcaagcaattcttctgcctcaacctcccaagtagctgggattacaggcatgcgccaccatacctggctaattttgtattttttttttttagtagagatggggtttctcctaacttaacattttcttaaatatcttctagcactttatctgtacttttcagaagacttgactttttcattgttgtctaatagtctccttgtctcccttatttgtgagtagggatgatttctgatttaacttggggtcttttaatcgtgggtacacagtaaatattcatttgatggctgggtagctggatccctagtttgaatgtgccatttaaacttagcacctttcaataagaatgatacagtggactttggggactcaaggggaaaggttgggaagagggtgagggataaaagactacaaattgggttcagtgtgtactgcccaggtgatgggtgcatcaaaatctcataaatcaccgctaaagaacctactgtctttggaacatggcctatatttgaggcatttttgtgtttccatggtgttcttcagttttttcctcaaagtagggaactaataaatatttaattgaacaaatgaagatgaaaggcatgagtcacctgtagtgcaaacctagctttttattcattgctattttaaagaaatgaatgttcttcagagaatacatgacttttttcatgtttctattagattgtgaattgatttggaaaattcgaacaaaaagcagtatttatgttccatgaaaatatgggccctcaattatgtacattttgtttgtttattggagtcagttcaaattataagttaagggaattattttttaaaataatgtaacttttcagagatttgtggtagttttaaatgatcctttttaaaaataatctttgtctgtcttcttcttttttttttttttgagacagggtctggctctgctgcccaggctggggtgcagtggcatgatctctgcttactgcagcctccgcctcctgggctcaagtgatccttccaccctcagcctcccacgtgaatgccactatgcccagataatttttgtgggtttttttttttggtagagatggggtcttgccatgttacccaggctggtctggaagtcttgggctcaagcgatccgcccaccttggcgtccctaagtgctgggattacaggcatgagccacacctggccttaaatgatccttttataagtgaaattctagaaaggacattttaagggacagaaaccctctcctcccccaaatgtgccttgctgagctgttggaggcccagctgaaagagttgattctgtccaagtgttggttagtgctaaactaagccatggagaaagggtcaaagagcatgccttggaaagaacttgaggagaatgacctcagctatttgcagggggagttaaagactgttaagagaagaatctcctgggacattatagggctgtgtgtttggagaggggcggtgcctgtgaggctcttgttctttagatctggggtgggatctggaaatccttatcaagtgtttcaggtgaattatatgatcagacaagtttggggaactcggagttggggagttggccctcttggtaatctgtccctataaggttttcaatctaatggctggaaagaggtgagaatagtgcttagattaaaggactccagttaggagatagggcaaaattgaaggttttaatcatcatattccttggagtaaaatgatagccagctattggcagttttatttagaaatgaggacacttttgtgcactgtacttccaaaccctctgaccacaaggcagatgtaaaatacagtaatagtggccaacaattttccagcactcactacttgccaggcattttcatgtaaatatgtattccatccatatgtatattctgtgtgtgtctgtgtgtatacatccatttatctatatacaaacacactttccttaaaaagtaattctggaagatattctgtttttctgtaggtgtttctagtgtccaccgcagaagctggtacatattgagtgcccccataagtgtttattgagtgaatcaaagatgagaaggcatactcaaaaacattaaaaaactttcctaagtcacttagagtgattttaaaacttttttttaactgtatcacactgcttctcgatagttcaagttaattatcttatttgtatctctagacttggtacagtgtctgtgttcccaggtggctgaatactaaggctaaatattagctgaatgccttccatgtgctcaacctgtctattgtctagaaaactaaaatctaggctgggcacagtggctcacgcctgtaatcccagcactttgggaggccaaggcaggcagatcacctgaggtcaggagtttgagacacacctgaccaacatggtgaaaccccatctctactaaaaatacaaaaattagccaggcgtggtggcgggcacctgtaatcccagctactcaggaggctgaggcaggagaatcatttgaacctgggaggcggaggttgtagtgagccgagactgcgccattgccctgcactccagcctaggtgacagggcgaaactccgtctcaaaaaaaaaaaaaaaaaaaatcttcttttgaaacaatattctggacattttccaagagggagattttcctagattgttctctgtagtagcaacttaagcttagaatgaaagaaaccagaggataaaagtgtacttcatagaaagtaatgtataagaagcacaatggagtgaatgggaaaaatttgagacagttggttaagaaatggtagtgaagctttaccttattcggacactttaaacactctatgaaagggagtccttttactcactggtaaaacagttctgttcatccgcagtgcctttcatttcagttaataagagtaagatgctgtacctataatttgcacctggaaaagcaaatcctcctattcctaatactaactgtttttctccttttaaggttaatacttttaggtggtgtaggttgtacccaaggcagccacagggatgggatgagcaaaggactagagggtgtctatctctgagaactcagaaagcagctcctgcagttaattaaaggtgacctcaggattcagaggaaccttgtgctttcccagacggcccaggctaaacctgggtagctggcaaccctaaatgcgtcctttgttagaaatcatgtagggctcgactccatctttagaaagtgagttcactgaaggtgagttaaggacaaggctctgaagagcggcctgacttgctttctttccttgtgtttgtggaggggtgtagacaaagacactaagtgaagatgcagcccccaaggctgtattgcctaaaaaccgtttctggcttcttcacaggaatattcctcgtggtctagaaggagctatgtgcttctctggagattgtttccacagaatggtgaggactgttagaaccaccttctcctttctctcctgtctcaggagggaggctgtaagtgctaaaaatgcccctgaacaggggggtagggggtgcagcacctccagagaagtggtacttaatgctggctgcccacctgacccctctctctatagttggaggctggggaagcctttgcctccttccagctttcaggacttgctgtggtaggtcctcatgatgcagattaccatagcactcaactacttcttaagagtacatagtttcttaaatatcaatattatacctcaagaggtaaagagaacagttttaagcatctatcaaaggaggaatagattgtaattttaggatctgagtgttttatttccttatatttctttaaaattgcttggactctcttctctctaacctcacactttcaccaccatcaccaaaatttgctttgtatttatactcatttttaaataaattactataaagtcagtaatttggagtctcttcggaagttcatctttaaaaaatcctccttcttttaaagtgaagtgggaggagaagaaatggataacaatttttaaggtttatattttatttccggctttgtttagcaatacatatcttaatgtactatacaatttcttcactaatgaaaaaacataattatttccagttttatttgattttggacctattttcttgctatgtgattattgtcctgtatctttaattacatcttattgacacccgtggcaatctcaataattagaaaacatagctttttagcttttaccatttgcttattatattcaatttaaacagggaaacagtgtcacttcctgtttatgtttcactttgcagttctcttaaattagttcagtgttctcaggagttcattcaaacctatgagggcatactagttgacaaaaaagagaacagaggattcaaataaatgtctctaatagattattttagcttcatttagtgtgattttgggtctgaagtgtttgccattaacgttctagttgcatgtttgtcttccttgctttcgtgaggagcaggggcagtgggagtgagtaggggagaacaggcgatggctagggaaggatgtagcactgatgaaggtgagtgagtttgttcctagtatgtttctttcttttttttttttagacggagtcttgttctgtcgcccaggctggagtgcagtggtgcgatctcggctcactgcaagctctgcctccagggttcactccattctcctgcctcagcctcctgagtagctgggactataggcgcccgccaccacgcccggctaattttttgtattttttagtagagacggggtttcaccatgttagccaggatggtctcagtctcctgacctcgtgatccgcccgcctcggcctcccaaagtgctgggattacaggcgtgagccactgcgcccggcctgttcctagtatgtttcatgtgggatggcaggttttccaaatcctagtttccactgagtcatcggtgagtccaatagagggaggattctagcctgatgtcagacgtcctgcttggcagactaatgaaggactttttttttttaaaaaatgtatttttaacacagattggtgtatttgtatatcttcagtaagtttcagttttagccaagaaataatctttcataacatttttcatgagaaagcatagaatgattttctagaaagtttaatggcaagttgtgttagatgaaaaggaaacatttttaaggacactatgcttcttgggtattcttgagcccttgtctatagataatagccggttacaatgtacagttttcatatttggaggggacatgggaaactactcacttaacttggagttaatattttggtgctctggaaacatctgagtttggaactgtgctgtgcacatctctaactggtttaattgcccagtctctcagtgtcttagcactctcagtgttttatgctcaatctctgtgtcttgttatgactatttggctcaacgtagtgttttgaactagtgattaggaagtggtagctgctgctgttttattattttattgctttactctgtgactacagacagatttaattgttggatgtatttcttaatgggataattatttaaaaacattcccagttactttaaaagcgtatgtgaatattagccatcagttttgtcttgaccttgcctttggctccttgagtgtctctgttcatgtgacagctttccagctcatccttaatgtcatactcgagctgtttatcttagtgaggtagtgtgggcctaaaatgaaataatatatatcaaaagcacctgtgggggaaagcacatctgaatgccaagcagtacttagttactgcaagtgctacttctaccaatatttttcttcctttctgcccctttaaagagaggttgtccctttttaatagatatatgacagctctgcttcctttcttaagtctaagatcaaagaaatgttgtaataaaggggagtcactccctcccattccttctctctttttgtggatgttgttctgttttttaagagcgatcaggtcttgacattagtggatgcagctgttgggctcccaagctctgcctttcatctctgggtcaccactgcagacagcatccttcatctctgtcatggtgtaaagacaccactgtgggggaacagtgcgttgcaggttaagtacatgaagtatttctagagatcctagccacctttgccgttcattgttgtttggatgcacttttctttgaaatgacatggaatgtttggcagagatgtcaatcaatagaagagtttctctgctttagaggtacctaaacctcaccaacttcttgtaaattggaagactagctccaaaaaagtaaaaggggttggggggaagaacaaaacttttactggcaggtttttttctagacataaacacagttgaatggaaaggataatagggatcgaagcctgtcttgctctatgagagtgaatgagctagtgttagactttaatgctggagaaaaataacatctacctttttttttttttttttaaatgaggcagtcagtgcagtctaactgatgaaaattaaaggtcagtttcttcagtgccccacctcagtgcatgccttgggccatgttaataatgacaatcccattatttccttgcagtaggcaggaaatgctgtctacacccattagatttgtttgagtggcccctggctggaaatgaagaaaatttaattttctaatttgcagggaggaaaaaaaaaaaagcatacagtgctacatagaggttgattcttgggctggaaggagtgtcatttttaaaaacttgaaattctgaatctctattattgagacatttggccctaatccacactgaaatcatgtatggatttacgtgcaagttaggtgtctaggaaacctttttaaatattgtcagaattggcacaattgtggacgttttaaccacatgtttgcaaactgcctagttgctcacatgtcccactggctgctggaaacttgcttgaaggagggctttgtcagagctttctctcggaatattagttttgcttttcagaagcaacattcatgttgaagaaaatctgtatattcattagggtaatcaattactttgtggtttcaataacaagaaaatattattagtgttacagaggaaaaaaatgtgaacctgtctttgtacattctaatcatattgccttgcagagttacatttcctaatcttagggctgacttggtttctgctactgttatgtcctttaagaatgagatccttaattttcttttttttttttttgtagcaagttgatgtccctcttacatttttcctttttatataagccaaaagatttttattgctattttgatatattatttggtttattgggatgttctattacagatcctcagttggtatataattcattctaagatactcaatatcacattttcccatgaaatacataatgagaagaggaccttaagttgaaaggacttgcttgaaatcagaggagtattagtagccaatactacaagaagcagacattcagtctttgtgtctagaggaggcagagtaaatcatctcattttaatggatctgtagtttctattaaacagaacctgtcatattagcaccataacttccggtcatatatttgttttgtattgactgtacatatagagcttctttgttgcttcttgaaatgatatattggaaaaacaaggagtttctaccatcttcataggagcatatcaatgaaccaagaaagttttatgaacattttcttttctccgtgtcctaattcccaaaacctttagcagtttgcctagagcagtgaccattttgcctctgacattttgtttctggttttcatcaaaaccaacatcttccataatgtttattttccttatttatttgtcactattaatgcttacaggaagcagcaaagcatggaattctttacttttttaataagtgtagtactagtgtaacttatatgtgtgttttgtagaaatacattttgatgatagcacgtaacataatacatatttgggagcattttaaaaatattttctgaatttatatttcacttaaaaaaaaagagtgaggtttctagtggcatttttgatattaatagtaagaagtcctgtgatccatacaccttcccagtgggtttttggataagtctcagattagttctcctcaggactcctgacactaattgttctccatggcatgggggaatttgaagcttatatataaaggacttaaaaggctttgaaaaatttctcctgatactcggcatttgggagtcaaaagtttgcatctgaaaaattgttttcttgattgagaatttaggtttgaaagtgactttatggattattaactggccacctggcctctgttatagattgtctgacctatttatttgaaatttatctagtatacttaaatttggcaagaaatcagggcacaaatacaagttaggcgtattgtttatttttctaagtcaataacgcaattcattttgccatggaaaagtaatcatggaaaacattaatacctgatagactgtataaacttgcttaacttttagcataatgatacttttttccaggatgctgaccggatggttttatgtaaggatgtttatctatagtccagtgaattaaaacttttaggtaaatagagggcatgtattacttattcctagggcagttccttttgaatgatttcacttattgagaactgtcattttgaaatgtttcaaaccaattaggcatctttagatctaaatcttccagccttcagctttagggaatacatatttggatttgcaagaatgtgaagatttagccaggtagtcacttcctattagctgtgagaggtcttcggactcaattgactggtgcttgttaaatatctgtttttttggagaatttgtttccctcccgaagagagaaccctcatagtcagtggggcccattgacaattctcaaatactatcttttaggattctcgtgactcagttttgtagtgaacttttgaataaatataagtaatgaaagatggtagatttaatttaaaagtctagattcttttagatgtcagtcagtcctgttgctagggtggggggtggtagtggtgtgttccctcaggtgagagtgtagtggtggtggtgggcagagggtaagacacatttatgagttggccccacaccaggcttttctctgtcttccctaggccatgagactgattacttaccatggtgagagaaaaccctaaaggccccctccacacttctcatttgccctttagaagacctagaagattgtaggaacagatagattgcatgaactggtacctgaagtttagggagccatcagttcaatcagtagtagtatttatttgagtgtagctgtaaagatgcggcaagagaagaagcagggagatgtctaattcctctgtttgactttcccactaaaatctaaattccttgaaggcagagaccgacactttcctcttctcttatatacagagactggcaaacagactgctcagcaagtgtttattgaatgaatgatttaatgatggagcaggacatgttgttttgacactgagatgccatgtgtttgaaccaggtgaaaacttatgtttgattttaattttaaagacatgttctaattataattcttactattggaggcatatggaactttcaatcaagaggaataactgagatacttcaaattatgtgaagatagaaaggtttttcttgttcagtcaataattattgcattgcagataacagaaacccacttaagctagtttaagcaataaaggtttgaggaaaatgaaggcagtgtttctatacctcctgagctcctggaaccagccctgggaagtcactggaagcacaggttgcatttcatcttttctttgctcttccttccctgatatttctttttgcagagcccatcctatatgaataatggatgcttattctaaactcatgaagtgataccaattttttcttttaaaacggcctggtctgcacattactttttttttttttttttgagatggagtctcgctctgtcacccaggctagagtgcagtggcgtgatctcggttcactgcaagctccgcctcccgggttcgcaccattctcctgcctcagcctcccgagtagctgggattacaggtgcccgccaccaagcccggctatttttttttatgtttagtagagacagggtttcaccgtgttagccaggatggtctcgatctcctgacctcgtgatcctcccgcctcggcctcccaaagtgctgggattacaggcatgagccaccacacccagcctactttttaatagtaaattgaagttatgggtgttagatatattctttgcaagccgttttgaagcagattcttttcctaatgtgtcatgtacaatctgtgggggaagaaggttatataaagcaagaatgacttctattcaacaaaatagtgatattctatattttcctgtctcttttgtttctttctttaaaatgaactacagtgagacatggccagattgatttcttcccttaaattgtctcagaaactgtacccagtccactaattgctttgttcagcggacaggaaatggttatatttgcacaagttacacaatcttaactaagtcggggcaaagaaccaaagagatctctgatctttttttccagcattaacctttcagttccacaaactaatgcatgatgcataaaccaggttactaggggacacttatcaaaaaccataaacttatttatctgaatgactttctgtttagggatactaagaaaagaagttacgtgaggtaatcatgctggtgctgaggttaagtttgtgcagtttcacttcttccttaatagtttttttatacatgcaataaaggacatgtccggaagctgatcagtgccagcatgaccatgaagtgctcagtccccattccttctctccttacccctcagcccccttgcaggctatatacaaatttattcttttccttttctagggttgggaatttgcctcctttcttcctgcccctgtctgttattggtccctagtaccccaatttctgctacttttctcctccttcttttttttttttttgagatggagtctctctccgtcacccaggctggagtgcaggggcatgatctcagctcattgcaacctccgcctcgcaggttcaagtgattctcctgcctcagcctcccgagtagctgggatgacagatgtgtgctaccacgcctggctaattttttggatttttagtagagatggggtttcactgtgttagccaagctacctgtcttgacctcccaaagtgctgcgattacaggcgtgagccaccgcgcctggccacttttctccttcttgaaagtgggattttctctttatcattgtttgattattgtataagtattatgattggcattttgcaatttgagcagagctgatattatatatggtatttctaagtacttttttttttgactctgccaaactgttaagtcattctccatccatctatccatccatccacccatccatccatcctcttctcattttgacttctattagttatttcctgaagcccgtatatcactgagaaaaagttaatcttaagtgaataacttaggtcaaaatgagaggagaatgaagaattaagtgaatgtaggcagagtcagaaaaaaaaatagtgtctctctttaaagcattactttttttggtgatgcctttgaaggaagtgaaattggtgtatgatctaatgctacaaaaccatatcttgctctcatagattttaagatttctcttttgaatgatccattgctgtcctttctttacacgtatcttttctccctatcttccttgttaaatacattttttcgttatatacttttgaagcaagtcttgatttttttgtattttccccatttttcttcaaatgttccacagttccctaaaataagatagcatttttgtctttttctacagtctattctttgctgtttacttcatccccacccaccgccaccaaaaatgccttcagaaagtccctaccttttcttgtacattgtccttctgttcagattcttgtatcgctgatactctcccctgctacccattctcctcccaacagttttctttgatagtgatatctgccttggaatttccactgtgcctgttaaactctttgagaaggataattctgtcaacgtttacttctcttccccttctagccccaaagactgaggacagtgtcctcctcatgcattcctgtgacgaggaatctgcactgaggtttctactctttcccttaccaggattctgaattgtctgtgactgtctgatatgattgctgatctctttcctgttctcagataggacacaaggggttccattcggagttggctcaggacattcagatgccattattttagtaatgatcacatgatgttttgagggcagcctgaaaaaaatagagtctctaacagaggagctgggtaaaatcagagtaggaccatctctaatgccttttctagctctcttactctgattttgtgaatttatccttagggacagtttttcatcaggatgagaccctgctgtggtctgaatgtttgtgtctctctcccctcaccaaatttatttatatgttgaaatctaacccccaagttgatggtgttaagaggtggggcctttaggagacagttacatcatgagggtggatccctcatgaatggcattcacgcccttataaaagaagcttaagggccaggtgtggtggtgcgaatctatagttccagctatatggaaggctgtggccgtgagaagattgcttgaggccaggagtttgaggctgcagtgagtgaataacccctgcactccagcctggacaacatagcaagactctctcttaaaatagatagatagattagatagacagcctaagggagcctgattgcccctccaccatgtgaggacacagcaagaaggcaccatctgtgaaccaggaaaggagccctcaccagacatctgatttgttggtgccttgattttggacttaccaaccccgagaactgtaagaaatgaatttctgttgtttgtaattacccaggctaaggtattttgttaaagcagaccagatggactaagtcagccccataatgacccgttttatatttttatttataatctatctgctgcttaattttgtgattagtggccagctactgtttactcatcttttattcatctgtaaaactctttttaacttgtctttgtaagaaacggttggctaacagatgaattttcaggttgttcagttttaaaatgttttacttaaaagggtaagacaactccccaatgcaaagtgtgacttcagagataactttcatttctttgaaatgtaggaagtccatagccattgctggctgacatctttctgctcaatatgctccaggggaagattatcaaattttagcttctgagctttcaaatggctcttattatcagtggcatattacatgaaactggttttgggctcttcaaatttatatttttggcaaaggtgttgggagatttgatttcattcgtcatcactgcagtacctggcgcatagtaggctctccatttggtgtgttggatgaatgaagaaagtgattctgctagtcagtggggtttaaaaacaagtgtccaccaacttaatgggtccccattgatcctgagttcacctctgttgccctgtatatatgtgaccccatgtttattgcaaccttatgggcatctcaggcactgcagagaacagcctcttaaaatttctggtagaggcctggtgcggtggctcacgcctgtaatcccagcactttgggagtctgaggcggacggatcatgaggtcaggagttcgagaccagcctgaccaacatggtgaaaccccatctctactaaaaatataaaaattagccgggcatggtggcatgcacctgtagtcccagctactcaggagtctgaggcaggagaattgcttgaacctgggaggcggaggttgcagtgagctgagatcgtgccactgcactccagcctgggtgacagagctagactccgactcaaaagaaaaaaaatttttggtagactcctatgtgccatttctggagaactgaaatagtagtggacatacataggattcattttagtgtagatatgactttttagtgaaacttgaagtcctacttcctgtgtgtgaaatagggtaataggatcacacccgaagaaatgccgccttgttcaaaagtgacaggatcgctgttcagtttggaatattggaaagtgggcaggtttatttggaagcactttgtttttactatatgtgtaaaactccagggagcattgaataggatatgaggtgctccctttggctgtgcattagcaacgtggcagttactgatctgtcatttactttgaaaaggaattacaaagttttggcctcatgcctggagtagctccagatggtcagaaaagatttttgtactgaagtcagaaagtatattgcagtgatagaattgggcttgtcatgtttatattagaacactggcttcccactttattcctctgcaaagtttttctttctttcttttttcccagagagtgaggggaggaaattgttgctttagagttatgagtctaatatttggaatactgttgttcttggtgataatgatgtagaggtatgattatgtggttaatgtagttactttgtcaacctaaatacccctgattcttagtatttacaaaggatgcatgaaggcttggaatgtagagatacaccaagaccattgtagctgatgtagaaatgcaggtaagaagcttcatttgggttgcgtttgcttgtctgataacctggctgttagcccacaactgttatttagtagcttaccaaacttcatctgttctgtcttcccatgattctgtggttgctaggggtaatgatgacgtttgggtgttcaatatgggtgggaggtgggcctggggagatgagcagtgaggcgataatgatactaacaccaagttttgccattttaggcattagagcatcttaaattccacatatgatcttgtgtaccttcatatcaaccctggaaggggaacgatgtgattcctattttcctgatgagaaaactgagactttgggaggtaatatctgcccaaggcaatatctaggtaactcccttctgcagcctgtttacatatagttttggcgaaaatgactacaatttcctgtcctttcaggacagaggtggctacaggcttcaggaaataaagctcattttcctctgggaaactcaggacttgtctgggttgagccatttagtaaagcttggtcacaaggctcagattaagacctggatctacgtgctgctgttcccagactgctttcagttactcttgtggttactgagtaacttgggagttagaagaacattaacaaagttttgtgttttcgaagaaaatgctacacatggagaagtgacactaagttgcatacttcagaaaggaatttttatctgttttgagattctggtctatacattgaaaatgaactaattttgattattatacttttaattggttgcacgagtgtgtgaacataggcagctcttttgaagcacttttactgaaaagtgtaaaaatttttgttgctgttgttcagtagcagacatatacaatactctctttttgagacatacacaatattctcttattgtggatttaggggtcttgtaccagatcacccttttctcagattgcagctcttcctccttgctttatgtagagtggtttctaacttggttctttctcctgtgcagatataagacttggtccgcagtctcctaccctcacccagtcttccatgagctatcaaaatcctcctctaggcttttattattttgcttcctaattttgtccttttaaatttccactgtttagatattattcagacagcagtggtatttttctgtatataatgtggcgctgtaattagtttgagttcttttggggttgtgtcttaaacagcgagaatggcctgattgatgtgctttttgaagtcttactacctttttgatgagaaggatgaaagtggtgtggagatgagtttgtctggcttactgtaaatctgatctgtgaggcttttctgcgttcactaaggcaccagagtcggactctgctttttttcttgtttgatgttactttattacacttatgaatgaaatactaatgctgttattttatagaagatcataaaataaaagtacactttcttagtgttttatgtttctttaaaaagataattaccgtgagtcatagagctacaattacatcaagagtttcctatacgaagcaaagtctctggtgggtttttggtacagtctttgcacctggatcagtggagcaaaatgtcatcacacttgaaaaaaaaattacttaacaggcccattaagaatcttcagaagtttgcatcttgttagggatttgtggtccaagagttagtactacagaacaggctcttttgtagacctagggaaaccagtttgtttctctgccacttaacctgcaagacttattataggtgtttccttctcctgtctgttttgaagagacttcctctgggaattaatggtagaatacttatgactcctgagagcagagaacgttcaggccatcatcatcttctccctctgggctgtacatggcctccctgtgtctctactgcctgtcatacctccccactcctccacctcagtcacagggcgactgccttgctttcggtctacctttcccaactcttcaggctcatcctggtggatcccattctgtagcccctgctgctcttttcaggggattctattttgtcttatacacttttgtcatttagttacccacctattccccccagtggactcccattctgggctcctgcagagggcttgtaagttcacctttatatccccagggtcagagctgatgctctgccgagtgaatggggaagcgccagaaagaacagaagctaatgatggactggctcgaccatggctcccactttcaatactcatccctctgtttcctcagacattttacttgaattaattttgtagttctccttctgaactgctgagcaagtatttggacactttgtgaggagccttttttttttttttttttgagatggggtctcactctgtctcccaggctggagtgcagtggcacaatctcgtctcactgcagcctccgccacccgggttcaagcaattctcctgcctcagcctgctgagtggctgggatcacaggcttaagccaccacgctctggtaattgtttgtatttttggaagagatggggttccaccatgttggctaggctagtctcaaactcctgacgtcagatgatccacctgcctcggcctcccaaaatgctgggattacaggcatgagccaccgtgcccggccagaggagccctcatttatagcaagaataaaaacattttgtcaggaaatttaataataagcccagactgagtgcttgctatgtgccagacactgttctaaatgctttacatgcatttcttcatttaatcctcacagtgtcctgaattaggtgctttattttattatttccactttgccagtgaagaagcagaggtagtgagagggtaagcaacttgcctgaagttaaaagctagtcagttgtggacttagggtttgtagccaggcagttgtggtcttcagggaggggacataacatcattcccctcctgaaactccatattcctttgtaaatcttattctgtgttacatattttcctgtccttcatttagttatttaggtcagcttcttgtacttctgctgcaaaacgttgctgtcaatttacttgacctggtaacctcccggtgagtttcgccagggcttccagtcaatttagcaggtcactctagtacctgtgggagggtgagggcatggaatcctcaggagagggctctgctgttggctgctgtctccacttgaagtggacagttttgaatatcttaataaaatcaaatcggatgttcttaggtattcattcattttattttcctaagcaaaatgttttgtaaaatgctgcttttacgtggctagagccactaaatatctctattaatacttttaggcaaaggttgagatctttgaagaattagtgggttttaaaaatttacttatttttattttttaattttaagttctgggatacatgtacagaacgtgtgggtttgttacataggtgaatgagtgggttttttaagttgtttttgcgtgcctttagtcttactggtttgccttagtttctctactctccagactgctgtgctgacttttcatagctatctgacttttcagtccagtgcccttttgatgctctggccaggtggctcttgtttcagcttcactgggagggagttgtggaatctggctgacaatcccatttagtcttcttcaatttaattggccttttcccctttcagattccaagtaggggaatagcctaaagccattttaggggggctactaaagcagtttacaaggtgatgccttatatttaaataccaccgtatttccaaatctgtttctattatatatatcgtttattgtagcattctcacagtgaccctgtggtgtgaacacagtgactattatcccagttttcagatgagaaaacctagtctgagagttgtgtgcctttccttacttagggcactgtggcaaataaagggagaagtcaagctactgcttccattccagtctctgaattccaggtcccctgctcccttttctttccagggcatgtatgatgtctcaaggttggctaacctctaattgaaaatctgtaggtgcttatcttctgcacttttgaaatgatatgaacgtgaaatattttcaacatgctaacatttttccaggccgttattaggggattaaatcatcctgttaccgtaactgcaattttagatgttctggtgctaaactgagatctgtcaatagagtgcaacctttcgaaagtcttaaaaaatagggtacatcttggactcaagaattatgatatcaaaataagacccttggctatttccggagtgtgttagccaatctaccctgtggttttctttctctggaattggtgaagaaagagataaacaagatccaaaaccaggtcgcatgaaaggatcaacactcccctggacatacagttgtttgggataatcgtaaatcctgctgtctgtagtggctgacgaggggagaagagcagaatcctagcactccggctactgactgtgaaactaatgtatctttgctatcacatatttagcatttaccttttactttaagccaaaaacaccttacacttttcttagatgagctttttaaaaacattgtaatttatgaaaaaaatttgaacatagacaaaagtagagaatagtagtggatccccctggacttattacccagccttgacaatcaatcagctcgtgccagtcttgtttcatctttacccgttttcattctctgctccttgctgtaatattctgaagcaaatctcaggcatattatttcatccttcaatatttcagtatttttttcagataagttctttcggaaatatattttcatctaatttaaaacaaaaagttttcaggaaaaatacaggcatttttgctgcaaaaattggtcaggattatgcaatttctaactaatcagcatttttcaaggttactggttttggctgacaaaattttttttcttatatgtggaaaaaattattcacagtaacaaatgcgtgttttgatagtgctaaaaattagtctatttttcagacttaattattcaattaaaaaataagacacttcataaactttaaaactattgtgtagaaacacactgttcttcagttttatgtgttttcagtcattatatttcccagctatttcaaataggctaaatatagtataccctaagcttactcaatcgttagtttagactcaactaatttggaattttcattgagttggatataactttaatagcaggtttccattcaagcaaagtatttgctaattgcaggtgattattaaggcaaagtcttaaggatttatagaataagtaaatggttttatgggctcatggatctttaggtatatatatatttatacaccttaatggtatgaatttagcctgacttggaaaaactaacctggtttatatgtgtatatagtccattaattgattcactaaaatttttattttgttaaaaatagtgaaataaaatcagaattaatttttttttattctctgtgaagagtcttatgaaaggtggtcagatttataagtcagattgtggctagtgaatcttagtttttctctcaaatacctcaagacagcatggaggctggttgtcacacacattcaaaggaacaaaatacttattagctaaaaaagggtatgcacatttttgggggctttgaagcatattgtagggcttagtaataatgacagtgaaaattaacatagcgagcacttccgtatgaagtcattttctcattaccatggtcttacgaggatagatgttgtatttatccttgttttacagatagaaactgagacatggagagtgaagtaactggctccaatcccagtgctaagtggtcaagccagggtcagaattgtaacagttgagttcatgagtactggcccttaacaactctgctggagtgcctcctttggttaaatactagtagttcatatgtcggaaactcatccttcattttcttcaatgaaaatacggcattttacagcagtgctgtccaatagaattgttgaaattatggaaatacccgcgttatctagtatgcgtatgcccattagtcacatgtggctgttgattactcaaatgtggctagtgtgactgagaaatagaattcaaggttttatttaattttaagtaatttaaatttaaatagttacatgtagctagtggttctagtactggacagagaggctatagagtttgagagacctgggagaatttgtagtttgcgtttcctggggtaatgacaatatcttggcattttgtggctatcagtatcttgacctcgttagggttgtcagtgaatggttgtgtcatgaaatagtaataatgttaataaaggtgaaatttttacaaagtggataattgaatgtttaaaactgtgatgcctaacaacaaaatcctgtttgatcaccaacctgggaaatccacagtctaccgcatctggaggcatcctcttgttaattcctttgtagccaagcaaaaactgctttgacattcccgcatgattttcagccttgtagatgagttcttgctttgtaaagagtccagcttcttggtcaagcttaacattaggcgtgatgataagatagtaaaatggactttgtgggccaaaagcagccattaagaagcaagtgtttaactctttatctttctcctacagcctgatgttgacagagctcccatctatgaaaatacatcaagaaaactcagtggtaatgaagctagatttcatttcaaatgacactgaggccacataaacggtgacactgatgcctcttatgatgtgctttcatctaagcctttatgtggcacttaagtctaattattttaattttttctttgtgttgatgaaaagggccggagtagttgtttccaccagccatggtggggctctgaaatggaagcaagcaaagcctccagatggtggcaggtattggaccatagccaccctgcagacataattaaacatgtctgcagccctctcatttagcagttataacacagacattttctttgttgatgggattgaactgttattgttagcatttatgtgaaggacttgcagtactatagccaggtgctatttctcagctactgtgttaaacactgggcctggaactctgctttgaaaggtttggagagaaggttcctcccaacattgggaatgaacatggtggttggggtgttttcagcaggtcctgtttgcccactttccatttgtaattctcaagtgtaacagttcgaatgtagagactggctgtgaaagtggattgggattttaagacaaaaagtattggacagcaggtgaaacacacttcgttcctggctgcagtaccagcttctgtctgaagttaggtaaatcatttagttgctgtggactttgactttcttcagttggcaaaacaacctttgggaggggaaaccaaatatcactagaaagtgatttgacttctcgaaaagacaattatggtttatttgtgaaataaaaggtagttgtgatgagtgagttcccgtttgctgtatctgcctccttgccaataaacttcccatttacacttttaatgatgattcaaagagcagatcagcattatgtaaaggcatttttgatgaattagtcttatgcatgtccctatatggtatattctgtagttaactgttttcattgaacctttacaactgactccaccttacaatgggtgcatgattttgtagcgtaagtttactacctgaccttgtttcatgtcctcttcactgaggacaaaaaaaaaaaaagtaacacttttctcttgtgctttttctcccctgatcccttcccccaccacatgacccttaagaaatgttgtccttttggaagccaggtcatttgtctgaatttaggagaatgttgagttgcatcttcaagaaagggatgcaacacaggatgaggactgtggaggaagactttctctgagtaagaccttgcaaaacatagattgaaatataattgtctgcaaatgaattgacaagtgttggaccccatttttccaggcacttgattgaaaggctgcttctagcctgagggaggtcttgatgatgctacattattgcctgtggccattgtgagtgccactgaggtggccctcttgtgtgcaagtagttgtggttccacaattccgctaggctagtattcagacctaattctctgcttacagatgctgtgaattccgtaactcagaaatgtgtgctcacaaacatcaaatcagcctgtacacagatacatagagcagccatgtatcaaggacttagaatgactgctgatccttgaactcttttttaaaaaggaaaaattagcacaaggttaaaacttaaagacatcagattagttctgtttaacagcaacctgttacttcgtgcttttgcatgtcagcagcttgtcctagagtcagcgagatttcttgcttgtgacttaaagaatcttgtcttttggctgtagagtatgatttcatggtggaggatgttgcagatatcttagtttgctattttatagcatgggttatactttaagggctgaaaaaaataaggtaatttaagcctgttttgagacacacggaaaggaagctatttcataactatcagtcatgtgaaatttggcaggcccctagcccgttagtggccacagtcacatgattgattaccggttggggacccacagttagcttattgcagaactgcatctggcataattggtgttgtcatccagtgtcaaactatccaccctgttctgccaacttccttccaataacaaaactttcttgccttgcacgagtgaaagcctgtgtgattgtatgtgtttagaattacagagttttaaacatgatccaatcacaactatttgaacttcttgattttagtacatttgtacctatgttgccaaaaacatttttttccttgtctttgtgtcttctaaaacattgaaggaagaggtctttgatgcttccttaatacttttatcatgtttgaagtcctgagctctataaataatatagtccttattatctttttatcttgataatttataaaactgactgtccaaagatatgtacgatacttgtagttttatatcaaagaattttaaatgccaagaaccagggaagccatctaattctccattcgagctagtgccgagacctactggacaacatcttgacacttggtcattggcctgtgctggaggcatgatattctagtcctggttctgcctctgcccgccagtttggttttagatctcttcatttttgtgattaatgatatgaaaaagttggaccaagtggtcacttaggtttccttcagtttttgatttctgtatgaagatatagaaatatcccctacacgtcaacaacaacaaaaatgggaattaaccgattccttctaaaagctgaaggctccttggcagtggatattgacccttcaacttttagaaggaatcagttaattttttgttgttgaaacatgtctcatttttatattgagcctaaattggcatggtcagagataggcttctatagcactatttttccacatatttttgagtggggcacacattgagaaacatattttacattgtagcccagtaaacacacacacacacacacacacacacacacacacacacacacaaacatttatatacatataactgaatcaaaagtttcacaaatcaatacttgcctttttcctttgtgatgcaattctattcgattttatttaaaagaatgccagtcagtgacccactaaattgattatgtgacccaagaatgggtcctgacctggagttcaaaaaacactactccatagcaacccagaacacattcgtttcttctttcacatgataaccctgtaaactcaactatggttagcttgtttgcctttagtcctcttttacaggcttaaggtcccagtttccaaagctttttctttcgtgatttgatattttgactcatcaccatactggtcggttgttcctggatacttacggtttgtatccctcttaaggtaccagaagaaatctaatctcaaaataaaatttaactagggccagggtctttcttttatattgtttcctactaatgtcattatattacacatttattctacaaatgtttgttctatacatgtgtactgagcactactatgtgttagggctatccttggtgcttgaggacactgcagtgagcaaaacaaaaatgtctgcattcagagagtgtacattgtagagaattgcactagccactaggagtatggcaatgtcaaatgaaatacccaagcgctcagtcatagatattcctctgtactgctcagttgcacgtgatcttttagggcaccatgttattgtagactgtcaggcatttactctcttcattgtgagttcctcctgcctttccacttgagtgcacatcttggcaaagatgaaatgtcaatttctgggaaaggcacctatgtgttgtttcccttattatttttaattaatttattttttttaaacagagtggaaattagagacttaaaaatgatcaaaatacagaaatatgaaattatttttcctgaggttcagactggttaaaggaagattgaaagtttccattgtatttgataaaggcatgtgaattctaatcaggtcacagggcatcaagaggggtctttaactctttgggaacataaagtacactttttaaataaaattataacttttcctggggtgactttgtcatgggtaaatttgggccaaggttaatggttttagaggttgaattacttatgtttgttttatgtaaagtaatatattagggcaagagatttgaatgaacaaaataaacaaaagatatggtctctatcttcaaagcttgcattttagttagaaaacaaaatctgcataatgaaattatataaacgagtgatcaaatcacataataagtacaacttgaaaatgatgataggtaaatagaattcatcaagaaagaataactggagacccagcatttgaaacagatgggaataaattggttaaaaaaaataaaaaaaagtgtttataataagttgaatgtaatttaaggaatctgaagcattaaaaatctgtgcttaggtgaaactgcagtttatttaccttttagaaactagtctgattttttttccttctgttgtttgaaaatttacaaattaggaatttgtcataggagatgtaaatatatttctaacatgagaaactaatgtctagataatgaaagggcatgggaaggaagccttaaacatgacattattcagtcagaataggattgcattgatccagcggtgtgaaaatcattatggagtggtgttttcacacaggcctcttcctttactttattctgaactacataaatatcaattaaagctttctagtccaagttagcagatggcgatttatgtcggacttataaacaaagccccagaacattactatacctaattgatgaatgctctctccctttcctgaacaaagattttggcctccagtgtggttgtctgagagaaaattaatgaattcttttctgtggtctcatgtagaaaggctcccgtttatagaaatatttgactttttcccccccaaaaaagaaaacttgaatgcttttaagttgcctagtaatttaaattcccaaagatggactggaatagtatttggcattaacatttacctaaaaaattatattttcggcttacagcagaatgatgcctcaaaacacaaaatagtaatcaaaataaagcacacagaaaagtggaatgtgtttaattattataactttaggtagacatccaaattagggctcatattttattgttgtttttaattatttctatttattattattattttttgagatggagtctccctctgtcatccaggctagagtgtaggggccaatctctgctcactgcaacctccatctcctgggatcaagcgattctcccgcctcagcctcccaaatagctgggattacaggccgccgccaccatggcctgctaatttttgtacttttagtagagatgggttttgccatgttggccaggctggttttgaactcctgacctcaggtgatccgcttgccttggcctcccaaattgctgggattacaggcatgaaccactgcacccagccagagctcatattttagactctttttctgtgaactcttttctttcgacttgttgttctttaaggtgagatgacactttgtactaattcttaaaatgaacccttccctcaatttgaaatatgtgaaaatagctgttttgtactatggacctgtaagtggcgtcttgtggtttaggggctgttgcaatgtccacctccagtggaatgtaggtcgctgcatcagaagaaggtagaggagccaggcctgtgactgcagaatgtattccttaccttttgtttgaaaatagtaaatttcatttgtgaaacaaaacctgccttttctttttcatcctagcttctttgaaatgagcagtaggctgatcgggggtagatattcaaatatactgaaacattaaggttgctgtagatgagaaaacagtggtactttggttgagggcaatctgcactaaacactttgactttaatgatagctttctgcccgctgccacccaggtgtctttcttgtgctcattggtttgagggtgcattcctcaaatgagaggggcaattcaggtaaaagttttcaatgttcctgcccaaggcagcctgctaaaggaagttctcttggtgatgaccatcacatgattgccacgggaatgtgtttactacacgatctgttgatacaggtaataaagaacacactgatgacttttccccacgtaatctctgaggtcggtattttagtaacctttgagataataatttaactcacgccctatagaaattatgtatgcagtaggcccttggtagagactgacatttatataaggtcagtgttggttgacctagtttgatctggccctagatttataaatgaatgaatgatctccccagaattaggaagacatgacatcaaaaatatgaattcatcattactgtaaaagtttaacatgctgttaaactgtagcatgttagtgagacgaggcctcagtatcttctgctggttggggaaaaaaaataaatgtgtattaagtctcaggagcctgcgtggtcctcatgcttgttaaatccagaatgggtctctccctttctccaaagatggagtttggccttggtgggattctgtgttgggagctgcagtcccagatgcttctgctagtttaatagaagagatcaggaagaacaaactggcaagtgaattggacagatacagacccaaaagacttcagataattggaaagaaattttgcaaccagggcatttctgccatcaaaacagaggtatcttgcaatgattcttgtgctggctgttgttgaggtcttactttagcactggggatgggagataattcccgtatagccataatatgggaaatcaccagtatcctttaagatgacaaaattcaaattctaataaagacaggatttgggacattttttaaagagaggtgctgggtgtggagagggaggaagtctggtttctgataagggcttctcctcattttacaagtctgcttgtcatgagagaagtattattcctggaaatgaaaaacatggaggcagaaaatccgtttcttcaaaaacagatagtggatttttgcactgccaacctagctgttgatctgtcagtcttggtaactgaaaccctatgaggctgcgtaacatctcagatgttcagcttcaaatctgagatcacaaacagggtcctaaaacaaaaagtttgttaaatgcccagtcaagaaaatggggctacggaaaaactcaaaacagaaaaataaggtttgtcttacaaaatgttcatactgcattcttagacctagttgctaatgacaatcagttacctgaattataaaaaaaaaggggtactacccagtttcattaattgccttgtatccagggctttgaaaggagattggatatttcatgaattgatttttgaaactgagtgtggtcctgctattaaccatgtcttgggagttcccacccttgaaggcatcttctgaagcttagaattttttctttctttttttttaagagacagagtcttgctttgtcactcaggctggggtgcagtggcatgatactagctcactgcaaccttgaactcctgggctcaagtgatccttctgcctcagcctcccaagtagctacggctgtaagtatgtattaccatgcctggctaatttaaatttttttttttttctagagatgaagggtcttgctatatttcccaggctggtcttgaactcctggtctcaggcagtcttcctgcctcagcctcccaaagtgttgggattacaggtgtgaggcactgtactaggcctgaatcgttgaatttttgactctagtcttgaagggatggaacctgcccttctagtgttgtttcactttgggataaagcccaaaggctcagagctcacctgtaatctggtggtggtagactgatgtgtgtccatcatgggttcaaagttgatatttacttagtaaaaacctgccaggcctcagatgggagttagatggtgaatctcctctctgtgtctgttaagggcacctcatgtgtttcatgtaaaatccttgtagagtagattctctgaatccaactgttagattgtttcaagtgttggactcattttccttatagtaacttacttaggaattcatgtaagttaaggacttcagctgcttacgttgtttcccattgtttggaaatagttaatgcactcttaaaaattgattaactgaccatcagtgtgtcatgctagtctaagattttactttaacaattgatatatagagattgaaagttgtgatgtagtaactctattttccctaagattcatctattcggttgacttttttatcccagtactctcttcaggattgatcataggtattgattggcactagtggtttacagatgtaagaactgagagttagattaccttttggattctcccacttagcaactacagaaatttgcttctgtcttactttacttctgtaatcatcactgttttctccattaatcagaaatgtaaccttggtgtcggtggcatttcttttgtctcagtagctctctgatttttgttctcttttttttctttacagagcacaaaacttattgacatgagcctggaattttgaagtaagggcagtcatgctaatattgtgattttccatatttgtgctttgtatgtaaagtgactgtttttaacattttaattttaattattatgggtacataatagttgtatataaagtgactctattttgagttttacattttacaggataaaaccttaagattaattccatacatacatttcaaaataaggcatcgacttgatagaaaagttttctttttccttagatcgataatatgctgaatacacttttggatgcagaaaataaaattctgagcagtattataaattagaagattgaatggctctgttggtaaggttagtaacaggtgacagatttggtattcatacctgtttgtcactcgtcataccttttggcagttattcttcagagcagttagattagtgcattaagcatttggttttaagaaatgtgcttcaaagtgaaaggtagttaatgcttacctaattgactaaaaagagcttttatttcttttaaggaaaataatttcctcttgttttatattatctgggcacaatggctgagtgaaattaattgttaacttgaagcacatttattttctatggatgtgaatattcccagagtacatttgacactttgataatacttaattatggattaggttcacaattctgtgtgatatgttgagatgcaagtcaggggagcctattacatttataaaagttcagtaaaaagaaactcatcattaaggtggcaggaaataaggatatagttttggcatttgaattcttttgtgtatatgaattattttcctcatcagtctcattcattaatgtggaggtctgaccaatatatgttttcataaacattttttcctgtccccaaataatgtgaataaacttagctttattcctgcctgacccagtcatttactttctatggacaaatagtattccttgttatttgcaaggctgatgtaacgacacagctgctggatgcttggcatttctgcttctggtgaaatgctctttgtgcagatttatctgatccagatgtgtgaccagcaagctacatttctaattataaggacagccaaattccattataagcacatcatgggattatagggccgggagtcatcctgagaggacatctagttcattctccagccgttcagcaggaccacactttgtaacctactccagcactgaacgaagcagcaaagaatgttccacccatgtataggctgaacgtggaatcactggaattgtaactggaaaaagagacaagtccctctggtctggccctcttgctttgtgggtaaacagattcaggcccagagaagtttgacttaatgtggatttttatgactctttgcctaaaacttactcttcttttctctgaagtggtctgtgctgagggagtgaaagggtagaagactggattggaaatgccagtttcacatccagatgtagctctctactcatttagaagtaagaggtactgaattagtgacagctagattccattgaagtttattaagtatttctgaaacccagtatgaagtacgatatttcatgtctgtatatatgtttgtgtgccttagtgataaagtacaaaggaaactaggcatgctgttagggttagaatgtttgcaagtgtggtgtgtaagcttaccaagaacaacatctcagaataaataagtgattatttaacttgatttgatgttgttgagtctgggttttgattgtaccctacttcaagtgatagttagcctgccacagtttcatggatgctgggagaagacaaggggttcctgtaccacagaaaaaggactgtattactcctgacataccaaatagtgtaaactcttatgcttagggcttactggcatgcctatgttggttcgtccttgcctccatgtcccacaggggtgataaggatggagcgtgcagatggagctgcacacactttgggtttgcgttgctgctgaggaacactgaactcggagaatctgctgcttttatagcatgcagtaaatgaacttgctctttgttccaagggggaagatactacctcatctgtctgttcacattgctcactgcaaacataactttgagaaatggccttgatacaaaatggcaggatatgtagaagcatgagagacctatggaggggtgtctcaaaaccatcatgtcctataattgggacaatcaaataaaacacttcactagcaacttcacagagaatacaagacatcaggtagttgttaggaagcaaattcataatgaaaatggtaagtgctggataattagagtgaagatgggtagaaaatataaagaacttgatttcttctgtatattgacgtcttcttacgatttcaagatgtggtcagattataataaaaaaatactaaaagaaatcaggaattataaatcttgtttctacactgttaaatctattaatctttttgtgaaatgaaagtatagtagccaggtggacccaggcataggtttagctctgtttcttaactgcattgtgaccttagtttatttttctttttaattgtgaaagttatttatattcttagtaaaggaaattttttttttcagacaatagagaggtataaaaaagtaaaagcctctcctagagttcatggaggttgccacagttctgtggcctttggatcagtcaacatcagaatggaagggaaacgttaatgattttagtggctacttgttacttctgaaggatcaaagggcttgggacgtttacaaagtattctgggctgggtgccgtggctcacgtctttaatcccagtagcttgggaggccaaggtgggaggattgcttgaggccaggagtttgagaccaggctggacaatgttgcaaaaccctgtctctacaaaaaaataaaaaaaattagctgggcgtggtggtgcacgcttgtaggcccagctattcgggaggcagaggtcgggggatcacctgaacctgggaggtcaaggctgtggtgagctgagatggtgccactgcactccaacctggtgacagagtgagaccttgtctcaaaaaaaaaatatgtatatgtatacacacacacacatacacacacacacacgtatattctgaatctctggaaagatttatgaggcagtattatgcttctaccactaaaatagtgttattattttcacttttgttcactcaaatatttagctaatggttgtcttcaacgtaagttggggctacatagatcaggcaacagtatctttattttatggataacgaaactgagacattcaaggttaatttgtccagttacatggtttggccgtattcggcttcttatctccttagaaaagattttggccccaaataaaactttcataaagtaggagactatgtagttagtgcacctgatttcaattactctgttctgttttttaaaatagtatgtatcattttcttgcatactacataatttacttattatgttcattgtttctttccccttacgagaatgtaaacttaatgagaacaagaatttttgcctttctttttttgtcttgggcactggtgaagtttcaatttctggaacagcatattaatgcatagtgggttctccagctccatagtaaatttggtgatgaaatgaatcaacatgtggtaaatacgtggtgctacaaggtgatgagatcatctccttgatcttagattatgttttcagctttgagcaagtggtgggacatcttgggatgatactgcttacctcatttgatttgatcaatgagattgaatttgtaaagctgggcttcaggatatggcctacagatttttttgcgtttggttttgtagagtgttttaaaaactttgcaagcaacatttaagaactaagggatttcacgtaaaataagatttctagcttttttggtttgtttgttttgtttttttctttagaaactgaaagatctgacaacatggcctgcattcctatatggttagtgaaggtcttgaactaaatagcagctcactgttaagaaagggcatttgctctctagtttaccacagtccccctgactctctgttaactcttgataccgaagctgagttgtcagttgctttttcccatcttttacattctttaatttttaaatatgaagaaatattcagccatgttttttgaaaggaaataaaggaaaggtcaaccacttcactcatcgacattgcctccatggcccttgttaggcaattgaaacttggagccccttgatgtgtttatctaagacctctgcttctttgaggtctagactttttatgattatggttatgattgctgatggtatgcagaagagaagagatagcaattcaaaggaattaacctcagtgctttgactgtggaagtggtagcatggaatgtgagtctggggaaaagtgcttcctttgttgaactattaatgcataatggattcggatgttaaaagtgcatggccacattgcttgtttctcagatacagtattagaagggctctataggtgtatacatagtctctattctagagagcttttatttttctgtttgtaaaggtggcaaaaattgcaaaagatttaaaaaatattacttgtaaaaagtgatatttcatccaggagaaatgaatgcttgagatttgttgtctaagacctaaacaattaagctctgggccaggcatggtggttcacacctgtattcccagcactttaggagactgaggtaggaggatcacttgaggccagaagtttgagactggcctgggcaacataaagagatgacgtgtctacaataaattaaaaattagctgggtatggtggcacacacctgtagtcccagctacttgggaggctaaggtaggaggtttgcttgagctcaggaggtagaggctgtagtgagccatgatcctgccactgcacttcagcctggatgacagagcaagacctgatctttaaaaaaaaaaaagctctgcttcccttttaatataaagaacaaatggcatatgcttccaagggtacattggaaaattggcaatttcaagccatgtttaatgtggaaatgtgacttgtgttttgttattatatggataaattagattgtacaattagtcctttagactcatgaattgcctatttgattatgtgactctttatgtaaaaattggcctaagttcttatttaaaggaactatgtaagtgaaatgctaataacatttcttattttcatataatctttataaaattgggatttcacataatctcattaggagaattgaaaagaattaagttgttagatcagagttatccaaaaggcattctctagtgaacattagatcttaaaaagtttgtgtgttcaaaaacgttcggccttggggagattctcagtgtatattaaaagttctttgaagtgtagtgttaaagaacttctagctcttcaactcagagtttctcaagcttgatggaagttttctacagaagatgtattagcatgtagcagagtatttttcctgtgtcacataccttagaaattttcacctggatagatttattaaagaacagacaccacaggtggtgagttcctggcttcacatggtttcttgcttttcctcacttttaccagagtttatagttccatttcttccaagccactcccggagatggaaggaagtggcatgctcaaaacagtgtagaatccaaacggaatgagaaggataattttgagtcatctttcttttgtttagaaaataaatataccttttttgaaaagaattgatttcctatttttaggtaatgtacttctagttaaggcgcataacttaccttgcctatattataaactatcagcttgaccgaagccatctttttcttctgctgttggtcttttagagacttgctgttattcacatagataatacttgttttctctgtgagccgtactacttgccaggtttgggacttctcacatagaggctgatgtaatagggaaagacagtgggataattaacattttggaatttgataagtaagaatgagtgcatatgtgtgtgggcgttaaaagagcttataacttggttagatttcctttgtaaacttaggtggaaaatatgcttagaaatttgaagtgatttgagaagcaagagaccttatcctgccattaatcagtggtgtgacctctgaaaaataagggatggaatagataatctcagaggtgctgctgattaaaaaaaatttttttttcaaatttcattgcaaattttaaatcctgatgttgcatttttaaaacttgtataggttgtaacatgctggaaatgaaatcaaaccctcactggggaaaaattaatgctgatgtacaaatatgatttggaatctttggtatttgccaggggctataagaattcaatgcttctccatttgtgatctttctgtagcacgtgaaggctgattgagaatttgagagccctagctctagatctccaaataattggagatctctaaatagttagaaatatgcaagagaagatagtccacattagcaagagatgagaatgtagtatataccactttggttcatgtatcttgaagcttttatcattcgtcacctcagccattcgtttttttcagagtaagtcatatgcttagaaccaggaaattgcctgccacatcttgttcctggaaaagctgacagcctaaaaatgcttatcattcaaggtgtgacctaaatgagtgttgtacagctattgtaatttttctataaagttatgtggctaaacaaggtactttctagggaaaatttcttccaagtaggcctttatttacaacttgaatcctaaattagcaaaaccgctgtactggtaccacagaagttcatattagaagggaatttgcaggtagtctagtccaacctttttatgttgcaaataaatgtagactgagaaacctaactcctgcagctagcatacataacagaactgaaacccaaatctccagatggccaccacggtcatctttcctcagtatcatgtgggtttcagtcagtgtctctcgtgctagaatgaatcccatgtaaagtatgttttaaattaaatgtaatgcccatacatcaaatcacacaagtctgtaccttcgtaattatattttgaaatgcaattgatttgctgaatataaatgtttgaaatgttttgtacatagctattacatttctttaaactgtattttataagatgtatatttcaatgacaatacttatcctacaaaagagaatggtttcataaattgatttaaaagtaggtgccagtgttacacttataaataaaaagataaattttacatagtgaaatctaaaaaagaaatgcaattgatcatttaaaaaccacattttaaataaattctacaaaaggtagccattatgattttatgattacttgtgttgacagtattctcctgtggaatgtgtgatgcttaaaatgattagcttgtacaaaagctataacaatagtaatatttttactcatttattcaactgtaagattttaaaatttacagacaatagccaaataatattcagggttctgttttaagtgataaattagctttctacgggacaaaaaaggcattgacaagagcactgacttgtcatggtattgaatttcacagaattagttttggataaatgggattttcaatgtcctgtgagctctcaaaattcatagtgagcaactaatacccataggacaaagtaaaatttagttcacaaattattaattatttaatttgcaaagtaaaagtaaaaattagttcagcacaaattattattactttactaattcttgtttccaaattaaatatttgaatcaagagtgtaggaaaacatcttttaaaatgtgtgttataggggtacagtataaaactaggggcaggatattttaccataggattttcttaaaccctagaaaaaaacagtaagaattcattagggatgaggaaatttccttagtgaatgttggaaacaggatgcaatgtggcacagctgtccgcagaggtttggaggatttccctgggaagatcagtactgagtcatcagttgatcgaaggtaggggacggcacaacacataccatgcacaaatcgaatgtagggtgtattaagccctcagcagtatgaagattttaaattattgggtgggtacaaaagtaattatgatttttgccattaatataatttcagtcatagcactatcttaatatctctgacagaagactcttggaacattaaaaaaatcaagattctaataaggctgtcttgtgaagatcaaggcatggaggtttgaaaatctcagtgtcgattcattatctaaaaatctcttgaatagctcaattacaaagtcagccataagtggaaaactatgtatctagggtctgcaccgtgccggctgcataagataccgagtaaatgtttgaacaactgagggaatgaattcccaggtcggccatctcaactttttacaacgttaatgacaaatatgatttcgacatatataattcatttgtatcagtgttttgggtgtgatatctgtcagttgtgatggctgttatatgagttgaacagttgtgtttaatcctgatatgtaaattgttagatactgctttaaaatttttaaaattagtctattccgaatttccagatattaatattatctctgaaatgttgagtgaattagaagtggaagccagagactttgtctttttctctacaactcgtccaacttcaaacgtgcctccttttttctgctactgttgttactgagaaaacttgagcaggcaggtccttggtgcttttttctaaccagtggatggcaaatatgtgatgcacatctcctagctccttaatcccatgaccttgacagccatctctaattatcactgagcgggggcagtgaatctttctcaactctgcactctaggcaggtaccaaagtcaattggagtgggcatgtgagaggaaacctagggctgtgaccaaaaataaacaaacaaacaaacaaacaaacaaacagggagctggagaaggacttgtgcttaggaacacagaaatagttcttggtgagaacagaataatccaagtttcctgcttctccagagcagtattcttaatcactttccttgctcatggagtgggatagggttgtgaaaatgaactgaaatggcaccctttcagttttttcctgttacttaggatccagctcacaaaactaaattattctttaccttgtgtgatccgggtactgaagataatacagattgagtatctgcaatttgaaaatccaaaatgctccaaaatctgaaactttttgagtgccaacaggatgccacagtggaaaattccacacccaaccttgtgtgactggttgcagccaaaactttgtttcatgtataatattatttaaaatattgtataaaattatcttcaggttatgtgtataagggtgtatgtgaaacagaaatttcatgtttagacttgggtcccatccccaagatacctgtatatgatactttgtattatgtatatgcagatattccaaaatctgaaaattcagatctgaaatctgaaacacctagggtcccaagcatttcaggtgaggaatactgaacctatataactacttttcatcccagtaatttcttcattgcctatgaagagtttaggaaataagtaaaacaaggacgggcttggggaagtggagggaaggagtagaatataataaaactcttctgaagtatttgggaaaatattttttaagtaactgttatagatacaagtatgtcttatctgttaagtacagaggatttccacctgtcagtgctgttgaaagttttagctgcctttaaatttcttgttgcaaatgcttcttttcatacatttagatgggccttttttcttcaattaagttgaattaccaaggttttgctctatctatgtaattttaaaatgtgaatagaggcagtacatatggaagaaaaggtagatattttcccttaatttgcagatgtatgaaaaaatatgattagaaattacagaagtcagaattttaaaaatagatttagagatgagcattgtagtatcaagcactttgtagtttcctagtgttctgaaaagtgtgtgtgcgtttgtgtatgtgtgtatgcatgcatgcatgtttgtgtatatttgctttggagcatcttaattttagctttaggaagtaactttgtcactgcagttgctaaacatataagaatacgtattcatatctgttaaatatggtgcaaaaattatcttcaaaagttggcttttatttgtaggaaatacctcttaacacacattttcatgtggaatttgtatttagtcatcttgacaagagtagtcactaaagagaaatggtcaaaattgtgtagcttctagtaatattactcacagtgccctgactttactggggtgtgtgtgtgtgtgtgtgtgtgtgtgtgtgtgtgttagggaggtgagggggtaggggagtgctgtaacagatggctttagattgcctcaaatagggttgtaaatttgactataagatgagtcagttttctgtgttcatttcatgaccatgcatggcacctctaaccttaagtttctctcaaatgctgtcataaagccatcattactgatagaaaaaacaatgcacatttcaagtgtttatgatagtggttgataatatcatcttggagtagaagaacagcaaacctcctatgtcaaacagagcagcacagaatgacaggtctctccatgcaaaagctctgtatggactcctcagcaaacctggagatccaggaagagattcaagctaaacgattgactttttggctatcagttaaggagttcatcaaatgcctgagcccctgtcatatgctggactctaccttgtgttaggtatacattttctgagccttaacaaaaagattcttccttaatttatttagcttccccacacattattaagtgggggagaaaattgctcaatacacattattatgtggatgtaaaacgtggactgaatggaggaaaggctgtttgcctggagtcttttttgagtatctctcagagaggctcataatttcaggtatgggagaaagtctagtcattacccagtccatcaccctcctttcatgcatgaggataggaagaccctaaggattctctgtagaggttactgtgaaccgtagtaattttgatgtagctttaagtagcacgacctggacagaactgtgggtgtcctggaaaagaggaggagagaatagcaagagcaaaagctcagcagcggtctcttgctccccagtatcaggacactgttcacatgggagggttgtgtagggcagagtaggaaatacattagatttttttgttttgtttatacagtgtctcactctgttgcccaggccggagcgcagtggcatgataatggctcactgcaacctctgcctcctgggctcaagtgattctcccacctcagtctcctgagtagctgagattgtgagctgagactacaggtgtgcaccaccacacctggctacttttttattttttgtagagatggcatctttctatgttgtccaggctggtcttgaactactgggctcaagcgatcctcccaccttggcctcccaaagtgctgggattacaggcatgagccactgcacctggccagaatctttttttagagacaggattgtcgctctgttgctcagggtgaagtgcaggggcataatcatagcttactaccccttaaactcctgggtccttgacctcctgatcctcccacctcagtatccccaccccacccagctaattttttttttttttttgagacggagtcttgctctgtcacccaggctggagtgcagtggcactatcttggctcactgcaagctccgcctcccgggttcacgccattctcctgcctcagcctcccgagtagctgggactacaggcgcccgccaccgcacccggctaattttttgtatttttagtagagaaggggtttcatcgtgttagccaggatggtctcgatctcctgacctcgtgatccgcccgccttggcctcccaaaatgctgggattacaggcgtgagtcaccgcgcccggccccatctaatttttaaatattttagagagtgggtctcttactgtgtcgcccagggtggtctcgaactcctggcctcaggctgtcctccctcttcaacctcccaaagtgctgggattactggtgtgagtcactgcacctggaaggaaatacactggtatagcctttaaggttcagaaaaagatcaaaggcagtgctaactttagtgtactaaggaatcttctggagaatttcgtgagaatacacactgcctgctctttctgttcaaagggaggatatctaggcctcccttcagagattctggtttagtagatctaagtgagaactgaggactctggatttttaaacagctgtattgagatatatttcacatgtcatacagctcatgcatttaaggtgtaaaatttaatatttttagcatattcatgtcgttatgcaaccaccaccactagcaaattctagaacatcggcattgtgtaaccaccaccactagcaaattctagaacatcggcattgtgtaaccaccaccactagcaaattctagaacatcggcattgtgtaaccaccaccactagcaaattctagaacatcggcattgtgtaaccaccaccactagcaaattctagaacatcggcattgtgtaaccaccaccactagcaaattctagaacatcggcattgtgtaaccaccaccactagcaaattctagaacatttttgtcccttctaaaagaaacctcatagccgttggcagttgcttcccaccgtcaaccccagccccaagcaaccaccagtctactttctgtctacatttgcctattctggacatttcatataaagggaatcgtacattatgtggccttctctaactggccttttctactttgcataatattttcagggctcatctatgctgtagcatgtatcagtattttattcctttttaaggaatgtatccataaaatggatacatttaagctatgcgtccataaaatggatacatttttgtgtgtccattcttctgttggatggtttctcctttttgagttatttaagtaatgctgctgtgaatatctgtgaggaatctgcgtttttaaacaagcaccccgcttaattctgttgctgatagttcctgcacatatctggagaaactctaacctgaatggttagtgttgtagaatgactcccctcacagtgctaagtcctctgttccccatctcttatgggtgcttctgcttgaagaatcactggtctgtgagcgggtgtgtagtggcttagtggaagtgaggttccagaactaaattacatggtctgcatgtgcagggtagagtggacagaagggacatgacagggacagtaggcagagtaaatgggtcctgtactttttcagaatctagtagtgacttgactagttcctgaactagggtgttgctgctggtggtggtaatggaaaggaagagtcagaggtaacagacttcatcaaaggaatactctcttcagtaatggtgattttaaaatactcggcaatttttgtttttcattgactcagacacagttctgtctaattctgaccttatctattcctatcatcctgttgttcaaagtaaatgtatttttaccaactgtttgagagaggaaatcctgggataattagctgaaggatatagtgtaataaaaaaataccaagttttgatattttgaagcctctgatctactagggatgtttagatacagtacaagcctgagtcagagctgaacttctcaaagttctttttcagacttgggattctgtggtatattctgaaactgaaaatagcttctaggagattcacagtccccaccaccactgcccattggcgccactgggcccaaagtgaagggcctagaacagctcacacctttttctgagagctatagcacagctttagaagagagattgtcgcagccagtgacccatatcgggtactcatagagaggggttttgtttaataggattacccttgaccagatatccatgatctgtttcacatttttccgttagattatttggcacagatgtgatcagattgcccttaagatgctctttgttctgtgtactatttttcccctctcctaacacaagcatcattaaaaaagtcttggagcattgatacatcaaaagattcttctttctacctactttatcaaaatcactatgaacactttggtgtatgttcttctagactcttttctttgttaaaaaaacaaacaaacaaacaaacaaacaaaaagcctagttttgcacagagtatcacagcgtgcacttccttgttaacctgttatttccccctacaaacaatgtgttgtgaacaccttcctatgttagcagattgatttctacagcatttaaaattggctgtagagttttgcattgtatggataaaataccttccaagttttcactgtttcatactgtgatgtatgttttcatacattgttctaaaatatcttaagccacatcgtacatattgccagtttggttctctgtgaattttactggtaacaatacaacctagatgctcagggttaattaagtattctggggcaaagtgccattgaacctggttcctggtacatacattcattctgattattggttgggataggtttatagttgtgaaataggtgctacagacagttaacataaaacatcctgtagctctcagaagatagaaaatgcaccctttaactttcagaaacttgcatacctataaacgtagaaacaaggaattgcatttttattaattcatggaatccagtcttcataatggatttaaataattctatttaaaatatgtgcacacaatctaaaagcattttgtcattgtagcctaatatcatataaaaagaaattgtgcctctgagtgcacagtggacatacctgttgtatcatctgtttttctggtttattgccatctttctgccagagtccaggaccctagaggagaatttcaccatcttctctgaagtaaaatgtgatttaggaaccagcttgcttattttttaaagtaatgagtatcactgttatgtatcaaaaataaaaaaataggcagattgattataatctgtagccccttactgtaaatttcaaatagaaaagcaagattgagaggaaatacatcatcattttaacagtggctatttttgagtggtgagattatgaacaattaaactttcttcttgcttttctgtattttcagatttctagagtgaacatgtattatacgctataacgcataggaatgtgggaataaaaatacgggccaaatatttttaaaaggtatgggatgagggcgggtgggctggaaagaacccataaagataagagtgggtagttacttttccactgttaaagaatgaggcttgccagctcctaaggaaatctctgaccccaccctgtacttttcaagcaagagcttttgaagtcttttgtgctagttagagactagcatagttagtacagctaagtaagtatgtaacagattctattattaggtttatctttgctgattcccatttgattgacagcgagttctccacccagaaagtttgatttattttggcagttggaagaggattttatggagcacttgttatctaaaaaaagtaaggctgtggaacctgcttcccccacccctcttttttagctgtttgggttggtcctagtgagcatgcctaatctaaggattactcagcaaacatgaccttagggctggttttgtaaatgttaccaaatctattacttaaccacagatgttcttccattgttgtgtcccacagccagagtagaatggtgacgattagttctgtgagacttggataaaacctgtattctttaggtctctttgtatgtggtggtttgaaagtatttcctcacaaaaatttaaacaatcacatggtgcaaagtaaattgaattatgttttcttaaaaaagttaacttatatcattatacaaattatagatgctcattgtagaatattttaaaaaatatagcaagttcaaaagaaaaatacaacttattcgttattctattatccataagttaagcattaacattttggttctatttcatttcagtcttttaaaaaattgtgtatacatatataatctgactgtgtaaattgcactaagcattctattgtgaacacttcctcatagtctggtttactttttctatgttgtaaaagcaacttcctgacactagtaaatggtattatttatgatgggcatggatacacatatcttttattttacagcagctgccttaagtagacttccagtaaatccttgagatgtatgtattacttgtgatattctttattattatacccaaattgatagattagtagaactggcaggggcattggtcatggaattcagtcctttaatttgagaaataatcctttgagctggagctgcaagaaatttttttttttttttaagaaatgagaaaaataagccagaagagttgccctttgcccaatattattaacttatttaatggccgtaagataacactgttggaagcagctgcctcttttcttgtacaggttgggaagttggggtattgagaatttaatcaacacatttttttaaagaaccaggttgtacttccttacatgctcaagtatggaggaaaaagccaaaccctgaggctagtagtttagtattgaattgccaaaatctatttattaatttcatttttcattcaccagttgatttgatggcatgtgtaagcagtcaccattgtcttgatttcctgcatgtacctgtacagaagtcattgttaacatgatactactgacagtacatgcttttctagttgaggagttaaaataattttttggctttgcagttaaacacagtggtcggtatttaaggtatttaaggaatcggtatttaaggaatcagtggagttatgaagtaatatttgaagttttgattttttaaaaattgcacattcaatgttaacacctttcagttggctttgaaaaagcagtagattcttgggagtactttccagaatatttgagaaaaacaattatggcttagtattttttttttaaagaaaaacaaagcaataccctgagagattatctagaaaaatgaaatggaattgttgagtttccccttcaccttgggaagaactcgggggaatggttgtgaacaacactggctttgttgaccctgaagtgtaggcagttagggcctgtgaacatggcatttatagtggtccaccatccttgctgccttggaaaattctttctggaatggcagaggtgctctttgcaaggcgtgcttcctgtgtgagtacctattgtggagtcctcggttgaatgggaggtttgtgagaagtggtttcccaccagcacacaatgctgcctctcggcaatgtaaatacacattccactcagggtcaggctaacagtgactggctagagcaaacgccttcgcaaagaaagatattttggagttccatttatttatagcggccagtggaaaattaatatgcttgttaaatctatttttaaaaatgaaagggaagtctctcatctgtttgttgaatgcaaatcaattagctgtggcatattttgattttgctaatttgttgctctaggaactgaatttcaatgtcctactaattcctttgtctatatttgaaacttgaggttctcattttaaaagttctctttatgctttggaagacttcttttgggttctttgatgaaagacataaataaatgaatgaccctagaaaatactagatcaaatcatggcgggacttaaaatgggctcattgagcagtaaatgaaggtctagagatcagagcagatatgattcttccttaagaatggcaacacaatattatttgtcgttacttccttagtgtttgatcatttgctttgaatctggggcatgagtctgattacaggagagattgcacggggatccccatctaacaggcctggatttatgggtgtcaagtctccacctctcctgtactctgctgacagccccagcaggaagtacctggcccccaacatcagttttcttagccctccagcctgcttttctgctctcatgatttaccaaatgaatttgcctcacaaatgttctctaatgagtgtggcataaagtcctggagagagacatctgtggtagaattagaatacctcttaatttggattaatttgttcttcctttagaccctgtcaggtgaactctagttgtataatagaaagtataaaggagggacagcaatctgttttttttatgtttttacgtataacttgcttgtgtggagcaacaactctcaaagtgtcgtctgggagacccttgggtactcctaagaccctcttgggggttcatgacatcaaaaccattaataatcctaaaatgttacttgtgtttttcattctgcttctttgagtttattggtgacattaactgaaaaatattttgtgtgtgtcttttgtgttcatataaggagaagtactaaaattgaattggagaacatgccttttataccaaagctgaaatttaaaaagatttttctggaaaaattttaaaacccgttaatgaattccttaaatttagaatttgtgtaacttcagcacagaagagtgtcttgcacagaggagaaactaaataggtatttcttaaatgaatggatgtagctgcttactttttcttaacaaattgtattagtataaattaatgtcattgttcacaggcagtgtttagaatataggcaagcaccatgctttcaaacactgaaattcacctatttgcgtataagccatatatataccaattatcattcttatctattaaataaaacaaatctccttaattctctggtgtgcgacagttttctgtcgagagaaaatatttttctagagaattttgcatttttatgttttcaaaatgtttatctgaattagtaatatgactatatacatactttatattaaaattttatcataatgagctaatctgaaatagtaaatagatattcccttacacagtatgtctttgcacctgctaatttgtttgtttgttaactgttgtcatttcatgtgaaatttctgtttcggtctcttctgagctctaagtaacacctggtatttgctttatgttcggtcacattaagtgaaaaacaaagctgcttatgagaatgtcattaaatgtaatatttctcaagaaataacttgcctttagttaataaaaaacagttctaaactgattttcaatgtatcagacagtgttcttactgatttccatccccccaaccatgcaggagtgagaatcagataattttttgaaaaaatatttgaaccaatatctacaattgcttatgtcagaaatctttgaaatatatatttaagtataaataggaggaactgtcagtgatgtttaatggtacagattcttttccttataatgaatgtttcataacatcggttcagttaaacaaaactgagtgtgtaaaataaacatgattgaattctatacgagctgattaaacaaaaaattttagtatcctcctggctgatcagaaatgaaggttaaggcatggggtatgttttgaagacaaattcaccttctgtaacacctgtcagatttcaaagtctagaaaagaggccacagctgggaaaccaaatttagacattggggcttatctcagatgaaaggtttcgtagagcatggaggtctgttgactttgtgtggtatttcgtcagaagtgtccaatgcagattcgtttttagttaactgagtataacatttcattgtaatgctatttaaccttatgcctttatttctagaaccctagaattctagcacagtgccaccacaaagtgggtacacagtaaatatctggttaacacaatggttgattaccttttttcaagttcttttgtttgatgttattttataaggtacctttcagctaggtccttcttttggaatattgttattattaaagggagaagccttcaacctgctttatacttattttacagtagttacttaaaattaatagaatcttgaaaccctttgtaccaaagatattactctagcagtctcttcatcaataacttgctgccctttggaaataattttgcttttgtgtttaatcatggcacatttcattaaaatcaccatggaagacataactttagcaatttataatttggtttctgctagttttttcccccctctaattttaaaccatctaggctaaatggtagtataatggatttgcttcatcttccttaagctactttaaaatgtgctctaaaaattattaagtctgcattttggtaaggaagcaccaaaaactcaattgtagcctttgtggaggggaaccaagcactccttaggagggagatgtactctcatgggttgtctttgaaagttaccttttgataccttttctgttttgtaccatgtgcttgttttatctagtctttaaaactcactaacctatatataaattttagccagctcttctacttgggttttgttgtcagattcttagatgttacaattagctcgctaagagcatggacttttcattatcactttctgagtctctttgggaaaattatttctttagccttagttactatatttgtaaatggacaataccagctacttcataggatgttttgatgctaggtaagaattagtgtgcaggtgccccaaacagtgcctttgccccagcaggctgaaatagcagcttcaaagctcttcctccacatctttccagaaagcaatcagttgtttggtgcttgcaacacattttttttttcttctattcaagggtgttatgcatgtctcttaggtgcccaaattgatgcacaaatgtgaatttgattcgtaatagatctctacaaatagaacaataaaatacattttggatcttattaaagggctatctggaagtcatgtacttaagcagccatatcattcatattatacataaagaaactaagacacagagagcttacataggaaaaccttgaaccacagtcctgaaaagcagtgggacctgtcaaagtgctgtggggtgccaggcaggtgtagtgcccaaggtctgggcaagggctgggtaaagcgtgagcttctggcgctggggaggaggagcatgtgttctgacttcctgtctctttccacctccccgtgcagattagaattagacttcctcaaggggctttagaagtgatgtttttcactatctgactacagttctgtagacttttctctcactgtcttacagaaacacataacatttcaaatttcactgaaaatctatattttcagttattcccatgtttggatgctgtgaccaggttagcttgggtatgtgtgagaataagggctcatagctttggcatgtttccttgtagatacttgactgtcatccttgggatgtcagggtgtgagatgtattgtgatatgagtgtacctggaatctaagtgttctaataaaaatggttaattacgtctgcaagcttatgtaaataccacttaaaaacaacgaacaaagcaaacgaacctttggttggtaaactttttttgtagataagccccctttcccttttagttaatatttgcaaaactgagctggtattatgtgaggatgtggatctgaggtcaagagattgtgtatatatagtgatgtaatttttttccatttagtttttatgtttctgtaaaatttggggtatgtcgggctgctatggaagcaacctctttatattaataggggtttacggaagcagcctcaaattacatgtaatttttactcataatccttatatatatggatttttctccccgagaaaatagtgctttcctgtacattagatttgagttcagacatgactctgctttgccaaatttaaaattatgccaagccaaaaatgtttaaaaagcatctatggattcttgaaggcagggcctatacaatagggacatccatcccctttttgcacttaagggcacagtggatggttcctttgggcttgttgcttgaacctagtatttattttaatctgaagtggtggtgtttttaatctaaaaaactcagtttcacaggatttctctgtggatttaaatgctcccgactaaatcttttatgcttataattggatgtaaaacgcaagaacgtttttaaggttaagaactttttcagacaactgtgattttacttcactaatgaacacatatcagacaagaaggcaaattccagactgtttgtgcctcaaccaagcagctgggcacatacctccaggtactgctcatgtctcaagaggtttttctgcatgaacaattatcaccactccttctttccttcaagtggcaagccatggcaagagtctttcttgcacagctgtatagaactcagctgtaaaattagattttattggcataaaaacacagtgattatcagcactgtgtgctcaatacattcttttctcaacattttacttagattcttccttttatgcagaaggctcaagctgtacttaaatgaaggaaacaggtttttagaagtttttttatgtgtctttttttaagctttagtttaatcaatattaggtatgcagggtaagcaattggtattgaagggaggaaacatactcccttaagatcagaaaggaaccttaagggctaatctataatattgtcattttataagaggaaattaattactgaagttcagagctaattattttattgacaaatcccagattagaactcatgttttccaatactcagtgctggagcctgtccactatagtttttttttttttttccaaagttttttttagcataggggatgtgaaaaattctaataacagttcttagtccctctccatatcctttttttgtgctacttaatttgattttttaaaaagcaaaggggaatgtttgcctgaagtgtacaggagcgattagctcaaggaaaagcactaaaacaacctctaggtttctcctgtccaatggcagtgtcccacatcaggttcataatggcgacatgctaattccacatgggcagagccaatgccaaggcattggtgtagtgttactgggaagagaaagaaaagccatattctcacagtagcagggaagtggtcaaaacagtcaggtgtgtgttgatggatgagcagattttcccagaatttcagaggtaaagaagatcacattgtgtttctattttgttttaatgaaatttttttccttttgttgatgctgttggtgtttccatggttattatcaaaagcagtttctggttttgctgaaaggctagaaatgacaactattttcagagtttctaggtcttgaaacatcagtcaacctttcaaagccagcattgatcaagaaggaaagaggtttttctaatgaggaaaataaaatagtaaatgatactttgacattccattagttgtaggaatgtgtgccccaactgactaccttgctttgctctctctctttccctctcttttctaagttttgctaataataaaacttaggaagtacacatttaggaaactgtctgtccttgtgactgatggcatttatacataaaggccacccggggtgtatggggggaggttcatgaatgcagtttttcttttcttttttctgtgtatatgattccgtatcaaattttaacttctagatgtttatttttttaactgcagtcaaggcacaaaccagtgtaaatcagctgcacaaatgtttgtcataataaatttttattaggttttatattggaagccatttagaaactagtcttataatcactcataaaacattagctatcttattgttttacaagagtatgtagagtatagtaatttcttagtaacatcccaaatccgtctttctccaaacacaatacagcaaagctgtgttttctgtgattcagtaagtcagattgcattttgagtattcatgtagttttccccacccccctgaatcaggaattttcttcccccattattattgttttcttaaaaaaaaaaaaaaaaaaagatggggtttcgccatgttgcccacacgggcctcgaacttcggagctcaagcagtctgtctgccttggcctcccaaagtgctgggattacaggcattttattactgttatacaaatggccaggatgtttctctgctgtattttctgaaacttgacccactatagattctcactattagaggtcagtgggtatttttagtagagaaggaaattttcatgaagtacgaattgagctgattttactgtgtctgtgacaatatatttttcaggctacagaacaagcatgtagcaagcaaaatgtttacatgttgttatgtttaaagtgtgtgaaggtgattggttaatctgtgttggaaaagactagctttatggagtacttggaatcacagttaactatagtggtatgaattctgatattattttcaagttgctttatgggtgcttgtatttgatgggttttgaattggagtatggaagtgaaaagttaaaactgaacacatacattctacttacttgttatgttactccatcaaccttttttttaaagagacagggtcttgctatgttgcccaggctggactcaaactccctgggctgaagccatcatcttgcctcagccttctgagtagctgggactacaggtgtgcaccaccatgcccagttttccactgacctttttaaacactgctccaggatagtcaaagttagtgggaggtctcattagggtgctggtgaagtgggcctgggagcctcagcctggcttgtaattaaactcagggaatcaattcctctcatccaggctggcccggtgggtttggttctgatgggtatactttgttccttttggtactgttatgtttctttttctcttgtcatttgaaattaatttgcgtactgtactgctaactcacatcttgaattaatgtaaggaaatttgggtcattggccctcagagtgaggaccaggacattttgttgttaatttgaaggccagtttcacagacttaaaaactctcccagcagtgattagggctttggctttaagttagacattcttcctagtatataattgctttggccctttgcaggtgggggctgcagttctcttctgcgaatcgttgtttttcatgaatttggcctgtgtctttcttagtataggctgggaccaaagtaccatggaaaatctttttagacttggagaagaggaagcaaaataagaagaaaaaggaataagctagttgcctagagaaatgcaaaaactgaagatcttttgtaatattcttttaaagttttctttaaaagctttggggacatatttgggtggaattaatgtcttactaacagtgaggatctgttcattctgtttccagagtgtcctgccccaaaccctgcgtttgagctcagggattgttggaaatgcggggtcttgctagaaggtaaccagtggcttgctttcttaggggaaagggaagttaatcacaagtgcccacgtggcagcctttccctgtcaatcaaaagaatagaactagctgggtgtgaagcacttgcggttttagtgttatgtgtggttagggggagaggttgcgagggcctgtggttgttaccaaattctttgaaatggaagtatgggtacaaacaaaataaagaataggagagaaaccctggtgctctgtgtgggggaaagaaaagttcatagaattcgacaaataaatgcgttgtagtagagatgatctactttctgtttttttttcttattagttttgcagtgcatttcttcatttgtaaagggtagttgatttcaagaatggattcatgatcacatctccgtggtgtgttgggggacagtgtggatgtggtacagccttgaccaaaatgcctgagtcctgtgatagatttggccagctcagatacacatctgtctaggaaagaaggaacccagaccaagaagatgagtgttagtcagggtggtttctactgagactttttgactaagatgaaaatgagttacagtgcggttatccagagatcacacatctggcctgctcagctaccttcacagctgatgatcagctggtggtgaaaaggaagactgcacaaagcgcacgaggaacttctgaaactgtactcagggactcctctctgtgtgtgtatgtaactgacaatctggccgctcagcccaaagaaaatttaagacagcaaatttaggaaaaggccctgagactggagggagtgtggttaatgaagaaaagagaaagaaaaaaaaacattaaaattaagcataagaacttattgggaggccgaggcgggcggatcacaaggtcaggagttcgagaccagcttggtcaacatagtgaaaccccgtctctactaaaaatacaaaaaatagttgggcatggtggcacgtgcctgtagtcccagctactcgggaggctgaggcaggagaatagcttgaacccaggaggcggagtttgtggtgagctgagatcacgccactgcactccatcctgggcaacagagtgagactctgtctcaaaaaaaagaaaaaaaaaaagtagaggtggggtgataatagctctgtatatgtaaggtcaaaatgtttcagtaacatcctcatccatcaccttatgactgaatacagtattcttataaactgtcctgaaatccctaagaaaaaagctgtggccagcctgctctttaatgaagaacatgtgtaatttccattcgcaatcattacaaacaaatagagtaagctttagttcttaaagttaactgtatggatgaaagccttccacatccattgcttcctcttttaattccattgaaaagccttgtcggctttcatcaggtaggtattcctgaggtctcctcacagctgagttgagccaccctgttgagagttaagtccacgtgtagttttgtctcagttactggttaaaacagaggaggttcacttttgggttgctgtgactatagagtgatgactgctcatgacaagccttcccaggcctcctggcctgacttaacctgctttaactgttgatggttttgcaatgtggtttccccacttcacaacctgaatctgtgactttctactgggaacactcactacgtttcccttttcatgcctggggaataaccaaaaagatactactgtgaacgctaagttttatgttttcatgcttttatgcttttcctccttgccttttctctagtctgttttctatggagcatagactaagtcatttctattttatgatcattttaagggacagcttggcaggcagttggcttttaagtagttgggcagttccttgcctcgaaataattcatttctttgtatgtctcttgcattctaggcaaataaaagtactctctgtgtgtgcatggagcacagaaatggggatttaaacatcgttggctgcatgtaggccccatctagctgaatctgttaccttatattcttgtcaggatgaagtctggtttatctctggtgaaactgttagggattacaaagaaggccttggattctttttttttttttttttttgagacggagtcttgctctgtcacccaggctggagtgcagtggtgggatctcggctccctgcaagctccgcctcccgggttcacgccattctcctgcctcagcctcccaagtagctgggactacaggcgcccgccactgcgcccggctaatttttttgtatttttagtagagacggggtttcaccgttttagccgggatggtctcgatctcctgacctcgtgatccgcccgcctcggcctcccaaagtgctgggattacaggcgtgagccccgcgcccggccgaaggccttggattctagcaagctggtggctgagggaaaagatcagcaatactggttatggctaagtgagactgctgggctcacagtggcctttattcacttttattatttcttctgttttctccatgatcaacggtgtgactgttgggtggttgaattgaaacttaggagtgtatgatgttcatatgttcccacttgatctttctcaggagtgtttgtacatacagcctccctgtctccccttcctccatcccttcccagtcatttctagtaaccactgaacactgtatgaggtggaaagtccatcacgtagtagagaaaaagattcaggcatctcacctaaagttgtctatgaagttttcaaaagcaaatataatgatctccttgtgccagtggacttctttggtttatttggggggtaaaatgccttatgaaaagagatggttttgcacatctgtgtcagtccccatactcttctatcctacttctgtaaggcctttgtgggcctgggtctgggggatccatctaccttatcccacacttgcagaacctggagttaatgccctgcttaggacttgacacctgtgcttaagggtgctatttagcggggttggattgctatgtctcattgacagcggtcctgttagttaacacaatgcctaccagaaggttagagttgttagtgttagatgtgttgttggtgttcagacattcttcggtactagagacaggagaccaggaatgcctaaatattgtaccagatcacaactgtcttctcttactcagttcaacctccccattccctcacaggactcacacaagaaacaatgagaaataggaacaaagtagcaccattatttggatttgagctgcaaatccaagtgttcaaaactttggttagatgggttggaccacatggagtatagacagcttcagcccaaagcaggtcctaaggaccctcatctccctcccatttgaactctctaaacctgtatcattatttactgtacgctggcctaatagaaggacctatggaggctgaagggacctagagtgaggccctgaaatgggtttactcctcttgccttgttggataagagagaagaggttctatccttaggctcacctgtaagatgtcagagctatgccaagcaggagagggctttggcactcgctaatgtagcagaggggatgcagagaagacaacagagccacagtctgcaccacagcctcaatagcaagtgcccaaggaggagggaagaaaaggtgaaattgcttctccacccttagatccttatactcagaccccctaatgtaaataaccaccctgttaatccaacctgcgattttgaagaaacattaaataagacatcatacttagcactttgggaggccgaggtaggtggatcacctgaggtcatgtcaggagttcaagactggcctggccaacatggcgaaaccctgtctctactaaaaatatgaaaattaggcgggcatagtggtgcgtgcctgtaatcccagctacttaggaggttgaggcaggagaatcgcttgaacctgggaggtggaggttgcagcgagctgagatcatgccactgcactccagcctgggcaacagagtgagactccattaaaaaaaaaaaaaaaaaaaaagataggcctgtgtaatgtcatcaatttgagaaaatagccatttttctcttatgcattattagtaagataaagtatattaggaatgaaattgaaatagacattagatttcttctccatcatttgacctgttcatagttcaaacaattaagtcatgatagtgtcaacagggattatcttaattttaattgtaaaagaatctgttttctttcatgaggataaactatcaggctttgggcttggtacttttatttgcttaggaactgagtaattgcctcataaaacagcatgatggtactattaacaccgaattataagacctgttattatagaatttgcttttctagttgggataagacttcattttttggtgcttaaaataattagtttctccaaatgggtgtataataaacaggtaaaattttgcctatttaaagtaaaaaagtttataatctcttgggtggcttttatatatcttttgatacttccaagggaggactttttttgggtgggatggagggaggagaggtatgcttgacgtttagagtggacgtgtttaagaatgagaataagtattttatttctgtcatatctacctgagacatatttgaggcagttattaacaattttgccccattattttgtctgatttgaatattaagtattaaagggttcattgaccaaatgtccttgaatttgaaattttggggactctattatgagtgataaatttaactgcgagctatatggcaatttgttcctgagatcatttaaaattgtgtgagagcgtgtgtgtgtatttatatttgttcgtttatacttctttgtccatctttgccatatattttgggcataattgaagaataaacacttcttaaggaacaagttataattgtaaataggaattaactgttattttccttctattgtattgcaaagctaaatgatggtggcagataccactatgggatgaaagtaggctttgtgttattttgaaaatgtgtatgaatttcattacaataaatggaataaacggaatagaaacaacggaatctacctttaagcctgactgaagaagttgccctggatatatctgagatacaggaaagttatgttcacatggccacttagagattctggtcttttgtctcctagttcaggctatttccgtgcctttgttctacccctctttggggcctgacataataatacagggctctcaaattagaataacttgggtttcacgatggagcacttagattgttatgtgacttgttgtgttacaggtgatttttgtggttctgagtcctttttaaaaagcggcggttctcttgcaggaagccagttgagggaagttctccatgaatgtacgtcacaatgatgatgaccgaccaaatccctctggaactgccaccattgctgaacggagaggtagccatgatgccccacttggtgaatggagatgcagctcagcaggttggtgtaggaagagggaaatttaagtcaaattgtctaagtgggaaacagtaacacagtatttgatttattttgggattcaaaggtttgtgatttcaaaccttagcatttctagaggtaagtgtttttgttgtagaaatactgtatcgttttttaaaatgtgattttagagaacaaaatcttccctcattcagtttgtattcttgaagtattgaaaaatggatgacttctgaagtgagtcattttcagactgcataaaagtcttcgaaataaaatgactgtttattcatgctgtattgtgcttgactagtttgcttggttggccagagctgcatgctcagagggtcaggttttggcttcacacaggagtgatctcgacaagacacgtagggcagtgtgaacccacccttgctcctggaatagtccttccaaatgtgtagctcataaaatcacggtacttattttctctgaatctcctttgtcactagtcactgaacattgtggaatagagttatttgtgaactcagtcaagtagcacttgggggaaacaatttagacagtaagtgaaactttaacaaattattagggattgaactattatctctaacattaattaaaaatttttattgcaacagttgggcttgcacagttttacaactagatattttatctttgtacatccttcagaagcataaaagcgaatttttattttgtgaaaagtagaattgggagcaattgcttggaaaatacccaaaatatactaataattcaaataagttaatcatttatttgatgtcagtacatgccccctgctctaatctatcatacagtatatccaacctctgtctatcgtagtatattctttgcatatacttggttggagctgaccttgctgcttaataatttatattattttctcctgcattgtactatcaacctcttaagaacaaaaaatatataataggtgctcagtaaatgtttgttagttgaatgcatttcatgtcttctcaccactgatgcagataactcccttcctgattcctcagtctcttcctctgctggattacttccaccaacatacagtagtatcttttatcttaaaaacgtaaacacctgcacctctccccacccaataaaacaaaacctcctcagttgattccacatccccttccagttgctaccttctgtccctttttccctctttggcagtatttctccacttcctctccttccttaccgcccactttacagtcttcactctgtgttctcatcttcctcttcagtctttagcatgttctgttggctttatctcaggagtgtgtgctgaatccatactctgccgtatccacttcacttccactaccactgctggaccccgtgccgtcatctcactagggtaggacaggacaacccttctcgctggtctctctgctttcccttttgccccaccagaaagcagtctccacatagatcctgaggggtcttttccaaataaaaactttctgatgtcattggcctacctcaggccacgttcttacacctggagtgaaatccagtcatgctgcctggctgccagccttccgtgttagtgctggcctctctctctgtcattctctgcctgctcttctgctcactgtgctcaagtagttcatgggaaggttgcagagtgttgtggatggtttcaagatgcagtgtttggtctcccaattaaaagaattactaatacaaagaaaaaaaaaagacaaggtatttagtcaaatgtgagtaaacttggaaaatgacttaggtctctcagatgtggtcacctcattcccatttgcctgtgtagccaagagacctgaggccacccatccatgttgttgtacaccatgtttatgttttgttgatttctcccacatgtctgtaattcagcttgcccagcaggctacgtggcatttccctaccttgcatatcttacctcaactctaagcagaagctgcttaacaattttggttaataaaaccatattttcaaagctggatgaggtggtgcatgcctgtaatcctagctactcaggaggctgaagtaggagaatcccttgagcccaggagtttgagaccagcctgggcaacaaagtgagaccccatctctaaaaagaaaacaaaaacaaaaacccgcatttttattaaatctttttttaatcttattaaagctttctctaaagctaataagaagaatctgttaatgtatctgttttataaatagtcaaaatactcaagctttatgaaaaagtgggggtacacttaaaaaatctcacaagaaggaactgttttgtctttttaattagtaaatatgtttgtgttagaagcattaacatccttggttccaagctattacttggcattaactctaacttttccttaatgggcaaaattgttaagtgggtaaagtgtgttagaaatgtccctctcagcaggaccagcccaagatttaccatgctttgtcattgcctctacatcactggggctcagcctaggcagtggcctctgtgcttgacatttttcttcctcattctgctcccagagtctccatcctgtgtctcctcattctttcaagcctcagttctttcctttgggttctaacatttagcattggcctaggtgtgcgtggtagaggcttggggcctgtgggttgaacccaggtgaaggcacaaggggaagacagagtgaaggagaaggaaaaccaaaagtggcagagaaacacaagaggatgtagggaaaggggagagatagagggccattcaaaagaagaaagaacaaaggtgagtctccaagacaggatcccagagtgtggggctgcatgagttttgaatgcttgctttgggcacctgctgatgtttgctgcctgcccttaagagcctgcgtaatgtggtgctcaggtggttccatgttaaaggatcaggctacagcagacataccagagaaagtgatctatatgaatgttttctgaggcttttactgtgctttctcactgaagcaacaccttttcatcttaataagaaccttttgcaggcacaggattgactctaggggtggacattgcaggcactgtacaacagaccctcggcggtggcatcctaaggtatgtggcacctcagccacctctcacatcatacagttgttaagagccatcccctggccataggattctgcctctgaatatctgttaggagtgtgtatggtgaagcttaccttgtatgtatttacagcgttcttaatactttgcagctgtgcaaaggacattctaaacatttctatatatgcaaaagaactaccacagttatgagaaagctctgcagttcccacagccctcctccttctgatttctgttctgctggttctggatgtaattaggactagttcttggcaggattctctgttgcgttctggctctctaaataagacacactgttaattttcattatttgaagtcaaattaagtttgaaaccttggcttgtcattttgcgcaggtaggagggaaagggcaagagtgaaaaggatgattattttcttaaaaagaaaagtcatcctcattacgaatgaagcttttaaaagcattatcaactaaaaataaataacaagaaacaatgtgaacagaagcagcttacacagttttccttatttaacagctttactgaggtataattcacatgtcataccattcacccactgaaagtatacaatcattggaatctggtatattcacagaattgtacaaccttaactacaattaattttagaacatttttatcactctaaaaagaaccctagagggatcactccctatttcctgtttctctctcccttccccccgtcctaggtaaccactaattcacttattttctgtctctgtaggtagatattgcctattctggaatttcatataaataaaattacataacatttggtcttttgtgtctggcatctttcacccaacatctttgttttttttttgagatggagtctcgctctgttgcccaggctggagtgcaatggcacgatctctgctcactgcaacatccaccttccgggttcaagcaattctcctgcctcagccttccgagtagctgggattacaggcatatgccaccacgcctggctaatttttgtatttttagtagagatggcatttcaccatgttggccaggatggtcttgaactcctgacctcaagtgatctgcccgccttggcctcccagagtgctgggattacatgtgtgagccaccacgcccggttcactcaacacatttctaaggttcattcatattgcagcatgtgtcagtactgtattccttttttattgccaaatattttactgcatggatctaccacattttattaatccactcatgatctgatagacatctgagttattttcactttttggctgttatgaataatgctgctatgcacagattcttgtgtggacatgttttttatttctcttgtatatataaccgtatatataaccaaaagtgaaattgagtagctttattttgaagtattattttccaaataaagttatctctgctttgtatcaccattaatttctcccacctctgaataactacagcctagcttagctaaataaagtttgcttcccttaatatgcctaattgtatactattgttgagttataaaaatcaggtttcaacctgagtttttaatgtgtggctattataaatgatgatgaatgcccttcaataatcagaaaattgatgcctttgttgacattttcagaagcttgtggtatattaacttacctgtgtttgttatggacttctgcattttagcgattttaaaatgtagcagccagttttgcgcacaaaagaataaacatcagcccaaattctgactttttattgatttaatattttaataatttctgaagaattatagcagctaccagttaaaccattagattaaaaacagaagtgtcgacatagggtggcagagtttactgatttgttaatttaacgtgatacttataagggtatctgtgacctgcatgagagtagtgtgccactttatattatattcttagtgactttgcttaaatatgtattcactgagggtcaattcctagtggaactggattggattagatacctctttgacctgactagcatttagcatatggaggacatcgagtaaatgatttgtcatactattcttcttctctcttgcctcttttaattcttctattcttctagaatattgctgagtgtttttaatgcttcttcttcagaaagtagaactccttaaacatatacagaaaactcgcttctcctgctagctcaggataatttatcatctacttgccctggaaggcagaaggcaattgcctcaatcatgtccaattctcttgactttgcctattcctgttgatcagcacttagcatgtcatttcatggagagagtttttttccctcttttgtttcttcttttgaaagcccttgtttcctctaggcagaatatgtaaccagagttttttcctggagtgttcttttgaatacacatttccagacagtatgttcaacatattaaagctttccaccctcagatggtgctcatcatcagcatgtcttttccatcaaatgtgcccctcctcctaatccagtgaccttttctgttctggttgatatcttcttaataactttcttcttgatggcttccgtcttgcattcagtagttcaaatcctgtcacctcacaggtttactccttaaatatactgatagccacggtgtcgggggacccgtgaagagttttgcttacataacagagtttgtctactcctcagaaatcccaacagaaaggaagttttgtaatcagtatattgtagaaaaatgaataaacaactcttgagacgattacccaggagaaagaaggatattcagatgagaatgggagtgacagttaaaaaagagactgcagctattattgctaaataacattatagaagagctccttttgtggcagaatcctgttatgggctgggacttgagctagaaagtagaaagaggctggtcatatgttgggtatggaaaaccaagtatggggaagctcggtcttggatcacattcttcagcatcaagatgcgtgagaaatgcacaacctgtgcaaatacttaaatgaaattattattgctgactgccgttcatgcttcctctaccactcaaatttataaagccctctggagtcaagataccgtcagcctctctcctttgaaatttggggtggaaaagaatgagaggataggctggcatgttggctcatgcctgtaatcccagcactttgggaggctgaggcgggcggatcacgaggtcaggagatcaagaccatcctgactaacatggtgaaaccccgtctctactaaaaatacaaaaaaaattagccaggcgtggtggtgggcgcctgtagtcccagctacttgggaggctgagacaggagaatggcgtgaacctgggaggcggagcttgcagtgagccgacattgaaccactgcactccagcctgggtgacacagtgagactctgccttaaaaaaaaaaaaaaaaaaaaaaagaatgagaggataggatttatgactaaatttaggagtgactgaataatagatttgttcattttaataagtatttatcaaatgtcttatatgctggcagtgtattaggtgctggtgacagaaagatgaataaggcactgttcttgccctaaaggaatgagcagtctagttgaggagcaaaatgtggcctaccaaaaaaaaaaaaaaaggctgtatttacacatacgtgaaatcacaggagagtgcttggattgcagagtgtcacagtgcttaggagttcagaggaggaattgaggattgggataagtgggcaggaaaacagaccaggctaggaaaagtatctgtggggaggctgagcctgggtcagatcagatctaagatgaagtgaaggctagaactatccagactttgtacatcaagtaatccgtttctgttttattaaaggagaatacattatagggattacatatgcagtggagagctattaggggcactacaaacaaaccttatctgcatagtcggtgatctctttgcttgaacttctgctacttagtgtctttgttagtgaatgtatttgtcctctgattctccagtccgaaggtccacccgtccgcttgatgcctgttgctcagaattactgactccacagtggggcagatcacaagcaccccccacaaccagatccacttttccagctgcggaggcagcaacccttgctttgagggcctccttttaactataaaaaaaaggtgtgattttatccagatctgtggtctgacttttcagatctctctgagttagttttgccaattttgctcactacaaaagcttccaaaaaggcatagcctatgcagaatctcagtcttacaaaggaaaatgttgatgccatgttatcagagggtgttgttatatgtggcacccccaataattagaacataggacatataattatggcagctctgagctgtctgggttgagagacacttcagaatttaattagccaaaggcaataataataagatataagatgtagtcagtatccttcaaatgctagaaattgagctgcccttaaaacaggaaggattaaggtaaaatactggcatggtagcattgcactgcagaataatggcaattttaaaatctaaggtgattttaacattatgattgttttcaaattattgcaatttttggctgtctgatttccttgttaactcagggtgggtagggactgtccctctcttgttcatgctgtgcctggcatctgaagtaacattcagtaaatctttttgaatggatgaaggatgaaggcaatgaacagatttaattcatctatatcagggcttgaaaagtagcttattgcctttgtcatacaggcatgggggggggtgtgtgtgttgtttttgtttttgtttttttacctttagtttaaaagaaaaagatttcagtaccaatattaaaaatgggaagatttatataaaactctggatttttctgtttaattggaaaaaccagaagacatacgcctgtaatcccagcacttttgggaggccgaggcgggtggatcacctgaggtctagagttcaagaccagcctgaccaacacggtgaaaccccgtctctaccaaattgccgggcgtgatgctgcatgcctgtagtcccagctactcaggaggctgaggcaggagaatcgcttgaacccaggaggcggaggttgcagtgagccgagattgcgccattgcactccagcctgggcaacaagagcaaaactctgtctcaaaaaaaaaacaacaacaacaacccagaagatatgttaacactgggctggtccttcctacttggcaacaattggcacagaagttgcagccatttgctgttgatgcggaatgtcctcttcggtgcctactctgtccacttcacttagtttccgagcctgcctgaactctgtggtcatccgggtttggaatctggaaattgttaactttttaaactttaaattgcatcttgtgctcatgcatatcatattttaaatacagaaaaatgattaaaattttttcaggcatgtgcattgtgtatcaaactgataatgtgttttaaaatcttttagttatctacttgccccatgacttgtaaaatgaattaggctgggcgctggttcatgttgctttgtagaaggatttcaactttacctcttacatgttaggacccgtgtgggtttttttgttttgttttgttttttggcttttagtttttaggatttgaggcccccaataagtgccgcatggaacattcactaaagcatagacaggccaaaagaaacaatcctattccttagttttactgtttacagtctagttaggagacattaaacacagatgcaaggtaaaagcagtccaagcgcagagatgcaaatacttgtgtttatattcttttttacagtttccaagaattgagtctttaagtatttattgaaagagttgtttttaagggtaaacttttcctggtattacctagatgaggaatttttatttaaagcatttatgtatgtatgtatgtaagtatttaagacagggtctccttatgttgcccaggctggtcttgaactcctgggctcagaggatcctcctgccatggcttccaaaagtgctgggattacaggtgtgagccactatgcccggccataaagcatttccatattaacttttaaagacataagattaaattggatagatttccaaactctgatttctccttttcttgttttgaaaatgtgtatttgtcatgttgaatgtgatgtgatagctactgatgtatctcatagtacagtaaaagtagtctataaacacaggaagaaaagatgagacacttctgcatccagaatgtgttaagacgagacacttctgcatccagaatatgtttgcacataatcgttttcatgtaggcagactcttttcttttttagtccaaatgattgatttaaacatatgactatataaaatatatgcgttacactccaaacatgacagtagtaagcaagctgcgtaaaattcgtaacattaatctccaagttccaaatgcagatactcattctcgttctttttttttttctctctcctacatttccaaatgcaaaaataaacagcctgccaaggagccagttgctgaagtgctgtagtgttttatctaggtaatcttggatttagctgcctttagattatatttgttccctcatttaaattggcattggccagaactagatgcctcttagtcattttctggtcagctttaatgttacaataacttgaagctagacatggtgggtccccagaagaaacattatgcatgtgctgctttagtgttaatgcctacattggtatttcttccctgccctgggcctttttccttaacaggtgaccatcagatcagatcatctgttgagagggaatgtgttttacctgagcagcaggtgtgttcagcactttgatgaacaagaataatttggccctcccttcctgggtcttctctttcctgccccttccttgctccttacagcatagtagacaagcatttgaataaaatggacagtctgcatttagcaaattacccttccaagggcttctgctttgcaaataattgggcagttaagtggagacagcaaagatccagaggtaattgtggtctagttttgggtgcaggttgactagaaagtatatcagtaaacttgttactaaggttccatttctgttgtttaaaaaaatgcaaatcagttcttgttagccacaccttagatttgaagggacatggacttgtgttattgaccaattatgttacatgacttttagttttcaggaagggtcattaatatgttttgtttttgagactcactctgttccccaggctgtagtacagtgatacagtcccagctcactgcagcctcaaccttctgggctcaagctatcctctcacctcagcctcctgagtagctgggactataggcatgcaccagcatggcctggctacttatttttattttttgtagagatagtccccttatgttgcccaagctggtctcaaactcctggtttcaagccatcgtcctgcctagacctcccaaaatgtgggattacacaggtgtgaccctctgtgccaggccttaaccaaaccttttgttgttgttgttatattcatgcaatcagaagttgataattttttttttttgagttggggtctcatcttgtcacccaggctggaatatggtaaaatgtttttgtgttttctaagcagtagtcagaaacattaatcactgagcatgttactgtctcagaagtttctttggtctttatattggagtgttgagttgtcattctagttcaagggagaagctgtgacatacagaaggatgtgctttaattaatgatgttgtttggtagttaaataggccacagtaatgcagctaatttttaatttttgttttatattgccagaatggatctgtttagaacccatttaaactcttatcaccttggcaaaaaagtcacatggaaaacatctatatagaatggctatttctttataatttacttgatggctttagttatgactgaatgtaaaactataatataaaatattaataagaattacaaatgaatggcatccatatttttctcttagggtttgtgataggaaatcagatactaggtttatctatatgaataatatctgtctgttttcaggacacagggaatcaattgatggtggagttgggtgttaggagacattatcctttcatagatcggtgtccacatccagcttacttcccacggtctcttgctttctcatttttaaagtggtttactcgggatgagagtgctcctactttttattgactacttctgcacacttggaacttttttttttctctctagatgaagtcttgctctgtcgcccaggctggagtgcaatggcgcgatctcagctcactgcaacctctgcctccctggttcaagcaattctcctgcctgagcctcccaagtagctgggattacaggcacccactaccacaccctgtgaatttttaaatttttagtagagatgaggtttcaacacattggccagtctggtctcgaagtcccagcctcaagtgatcttcccgccttggcctcccaaagtgctgggatttcgggcgtgagccaccacgcctgggccaatcttggaactttaaagagcctccattaacaaggcagaaagataagtgtcacaccaggtgtgaatgctgtctttggagggggacagtgactcattttctaacaattactcttaaacctagagggaaatgtaggacaaaagatgctgtaaggttgactcttccagagatttccataccttagcaatctaaaaactgtatgaaaggtcagagttaggactttgaaagaatgctaagtgttaatttttggcatttacctcaaacttaagtgctactttggaagcctgctgattactagaatgcttttagtctcaatccaatctcaacttttacttgagtggttatctgtggacactaagttaaaattgttggaaacagtggcttttaatggatatttttatctctttcttcctgccgaggtggagggaaggattagtgactattggggagggcttacgaggtgctggggctggtgctgagcccttacacacattatttcatccagtaattacacacgctgtaaggcggcagtcatctttatagacaaaacccgaggcgagaaaggttgagtatttgcaactggcaaatcacagagctggaatttgaacccacttatctcctcttccaaaactcagatcctaccttctgggaaaggtggagctgcctggcttggactcacctctcttagtcttgttcaggtaaacagctggggagcgagatggcacttggtttttgcacagtagtaaattgtaaactttatagaggccattcctcttcattatcttacatgatctccacattaactccagaaggtggcagtgcctctggctccccagcttctgaaaattgaggactaagcagcagtggtagtgtcggaaggcctggaggtcaggcttgtgtttgcaaaaggagctgggagtgaaatcttccgaagccccagtccgggtcacagcagcggctcccttttttccttagggaatggttcttttcttgagattggcagtaggagggctgctccctcccgggtcagcagttgctgagagatggtggtggccagagaagggtagtagacggtagtagtaggtagagatagtagaggtagtagaggttcctcccccgtgggagtctcaccctggagttaggagagggccttttgcctaccttttcttcccaaaccccgtccttcatttccattaaaaaattgcatcaccctagatgcagctttgagactaaagaaatttaaaaccttgtaagatttgaacacattaggtggtttttcattctgagtttacagagtaatgccagaataaaagaaacaaagtgtatccttcaaaaggaaagaaaatggccacttcgcgtcacaggtatttcttaaatctctcgcttctacttttcctgttttctaaggggaatacagaattaagtgtcacgcagatttttactatgagcagtgataccgtaccgggttgctcatgagttcctcgttttctttgttttaggttgatgaaggactgcttggactttgactctcctgaagatgttaattatatgtttcaaaaatcatgtgttctgctaaaaatcacttatgcatagccttggaaaaagaactggaggcagggagttgcttcagggtgcagaatatcgttttggaggccttgggaaataaatcttgagttagttcatttaccaccaagacatatttagtcactgtatataaacaaaagaagtcacagtgtgcctggacattatttgtcccagatggagtttcaacttggctcattatactgcactgatgtcatggtacataaactggctccgaattcaacgtgcatagaatcggctgtgtgcttgtatgtgctgagggtgtgcgggaggaggggcggggctggctggaaaatctttgtcacatttttcctttgctctctgtagaggctagtgtcagtcttgaatttggacttggtgcagaatgagagaagaattggaataatctgttcatgtgtacaagtcagtgtgtgtatgtcctcaaagctgtagttcttccaagaccaagaatctaagtgtgcctggctttccaacagttgcttaacaaagctctagtaactcaaatctagaaaggaaaatcttaaaagcattacattttaaaagagcatttttagtgtgtttgccttgaagtcttaaatctggacagcttctttcaactttgtaatggtcttaagtatccagctgtaaaattctgttttcctggattgtatggtggacaacgtctcaaactagttgcttaaaagtatataaaaaggtggccgaatttaattcttcctgtgtgctttgagagggcagcttgtgggtcagaaaactgagccggagagggtcctttcctggacttctgagcccttaataggaaatttccacatactgtggtgttactttattactttttattgctggcttttgttatgataatcttaattagaagcatttccaagtaattcaaaccattttgtagatgtaaagggcttagatttcagaacttctgtgaatggattcctataggagtcactcttgttgccgggacacacagaagctgagcagacactggaatgtgaatgcattgggaggtgagcccttaaggagagcccaaatgtttaccaaagagaaaatctggtcagaggtgagaagtggctggttttagattttatcgagagcatgaaacatggcagatttggtaaaaaatttttcttgagactgtaattttacttaactgagagacttgttactggtaggaatttgaagaaaaagaagttgggggtagaaggctctgcttcagggaggaacacatatttcctagaagagaacttgtcctgcctttggggatgttcctttgacccagttaactgcattctcttattttagcagtcttgttgaattatctctgtattgaattgacatggtgaaaccacgcctagtagaggggagaagtggtggtgtggactagacgagtatacattttggtcagacatggctggattccagtcactttgtagttttgtgaccttggaaaagttgcttgtcttcttcaagcctcagtttccccacttgtaaaatctagttactatctacctggcagatgacagggattcaataagtagtagctgtttcttaatcattgtagaaaaaaaacctggaaaaaggagttgataaagtaccctgcatcatgccaaattaatcttacagacacatgtgatattgaggatacagcttttttttaaacaaagaacagcacatttttatttttaagttttatttattattattttgagacagtctcactgtgttgcccaggctggagtgccatggcaactgctgcctcccgagttcaagcgattctcatgcctcagcctccagagtagctgagactacaggcacccaccattacccccggctaatttttgtatttttagtagagacagggtgttggtcaggctggtctctaactcctgatgtcaagtgatccatctgcctcagcttcccaaagtgctgggattataggcgtgagccaccacacccggccgaggatacagcttttgaaccttctattctttgaagaaaacagtattaaaacttttggagtagtggatattcttgctccttattttgcatagtaagagtcctaaagcccaggaaaacatatttgccatgtatcctacgggttgtgttgagcaaggggagcttcacctacaatgtgtacccttggaccttgagttcccagtgtttgcttaggtccccttggaggcttcctgttattgtatattatttttcaatcagctttggattcaggcttcaggtagggcagtgagcaaaatgaggcaatggacacattcacatcttcttccaggatctttctagtttacttgcttatgtttttaatcctgggacattttctttgcatgtgttattaccacaaagataaatatttggcattcgcaccccatcgcttcccttttcctgatttggagaaaagagggggctcaaaacacaaatactgcttacttttcagttttgcctgaggccagctgtgttctatggcacacagactggggtctcaaaggtgtgtgtggatgaacagtttgggtatgggggcctgggaagagcttggagattgggaatcttgggggtggggctggggagtggggagttgggagtatgtgtgaccagaaaatagtagcatgaggaataggtggtagtactcttctcatgtagtcaaaggtcacttttgaagttattaggtattcctggctagaatccttagttgcgtggaactcctctgcagcttttagattgtatcattttcccccttaaagatacctgttggataatcataaatgtgggctccaagggagaagtattcatttatacatgaaaacaagctacacaaagtgtggccagtggaaaaaactctagaagtgaaatgggatctcctctctggtatggtttatatcttgattgtctgagggttggatttaacgcttaaaaatgctgcaagtgtactattttgtctttggtcagttggtactcttctcccaggaggagcttttttttgggagacagtcttgctctgttgtccgggctggagtgcagttggcaccgtcacggtttgctacagcctcgacctcctgggctcacgcgatcctcctgcctcaccctcctgagttgctagaactacaggaatgcaccaccatgtccggctaatttttacaattatttttgtagatatggagtctcactatgttgctggggttggtctggaactcctggtctcaagtgattctccccgtctcagcctcccaaagcactggaattacaggcatgagcctctgtacctggccagaagcttttttgatggactgatccattaccctgattgcttatttgagtgactggtaatttttttatttgaggcataaattagacatttgcctccaggagtagtcttagatactattggcacctggttaatcagccacccaaggtttaaattgcaaaagtagcctcccttttcctcttttaatgagtataaaacagagttaggtttagatttatacctgtaaaggaaagatattacaccttctttcagttctcctgttagacaaagaattcccatgatgctgtgtttactcaattgtattaattgcaactcttgttttattgtttctctggactttggaagagtggtcacttatttttcattaaactttgataaactgccttctgtttatttccagcttcttggttcatgtaacactaacggttttgaaacagatctgatgaagcaatagtagcttagaggatgctcccatgatttgattagcatggttcttcttaagatctctggagaaaaaaaatatctagttaaaatctttgtcttttttttcttcctctgaagacatggtgcagtatgaatcagtttaatgctgactttggaaaagtaggaaatgcttagtgagtagacaaaaaatgatgtggtttggacagcgatgttctgtatcgcattttatattaaggaggacttgtagcagttattatatttctgctttgtggttggggagagggagggagggagggggagagagagaaattgcccaacttgtatgataggaaaggttaagtgccgggagttggccaggttgtgactcatgctcctcggggctgcgtgatgcaagaccttttgccgccagctcattcatgtctgctgtcaggaccggtcattgggctggtgtgtgtcaaacttatttttatctctgctttattgacaatgaaaacagctaggtggtcagcctccctcagtataataaaatgctttcttttaaaatacctcagtgccaagatgaatatggtttgtttaaataatgacttctgctctactgagaaaaattgatattgggacacaggagacttgcctggtttctgaggtaacttggtagattataatctggttgctatggctactcagcagcagtgaaaattacatgaactaaacatttgaagggaggtattttcgtcggatgcttaaaagcccgttacctatcatctttctccctgaagaagtgggatgggggtcaggaattgaactcagtaagcagggggggaaggtataagtggaccttagaggctggatgcctctgcgtcgttctttgaagtttggcctggtgtcagtgaccactgaggaactgttacagacactttttgtgcaatatgataagcagataatgtgacgacagtccggacatgtcccaattcagaaatccgttttcttgcctgggactttccgtaatactggtgaattgtattttctgaaccggtattcagggcacattgtctgacaattatgagcgtggtagaagagagtatatgaatttgggattgtcagagaaaatctaggacatagagtcttggcatccattggttcccccctcccccagctaattaattccatgggcatatattacagttctatccctagagctttaaacacaaagcaaatggtttttgctttattacagtgatgctagaattggtctaaggacctttaaaaagacatggataattgtctgtattgaagtgtgattttcttccattgtagtttttatattgtatatttatgtaaaaataaatgattttcatgttaaagaaatgactttaaaagctccttttcaagaaaacaaatatttggcccggcgcagtggctcacgcctgtaatcccagcactttgggaggccgagacggacggatcacctgaggtcaggagttcgagaccagcttcaacatggagaaaccccatctctactaaaaatacaaaattagccaggcgtggtggtgcaggcctgtaatcccagctactggggaggctgaggcaggcgaattgcttgaacctgggaggcggaggttgcagtgagctgagatcgcgccattgcactccatcctgggcaacaagagcgaaactccgtctcaagaaaaaaaaaaaaaaaccaaatattttaatcattctagagatcttgaaggaatttccttttgagtttttgaaacagtacagtgtgcttacattggtgataatttaaatactgaaaactcaaagattatctacagttattatataggaaaaataaattgccttgaaataactgtcataattcaagataatgagaagcaccaagggtgaagcttagtctgagtttccctgaatgatcctgttttttccaggtaatgtattttctgatttaaaaaaatttagtattccagcagtatcatctggatgaattattagaagaggcaaaatacatggatattaaagattgagtatttaaagatgaaatggttttgatttcaaaagttttacaaaacaaattatagtgtatacagtaaataaagttgacttttaaattgcatcttatgaaagcttaatttctaagctgagataattatttgcaatagttttttttttaatgttttatgactttcattcattcagtgaaagtagttattgagcacataacttattctatgccaggcatggggctagatagctggatgttatccttatcatgcctagattaaagaaggaaaggcagacactaacataattgcttagttaattgattgcagttgtaaattctaggaagaagtagtagagcgggtatttttgtttgatttagaacacatagtgggggacttgacctgtcctgggagtcaaaacactgttatcacaagctgagaaggatgaatagacgttggttgaggatggaggaaggtaggtggtaagctaagatgaaggagtacaggaagagtatcacagacagaggaaacagtatgcttgacagtttcaagccagggaggaacagggcttgttccgataactgtaggatgaatgtgacactgacatcctgtcaatttctagaaattatatggtgatttttaaaatagtgttagccttgtacatggtggtttttaactatagtttttgtggtggtggtggttgtttttgagatggagtcttgctctgtcacctaggctggagtgcagtggtgtgatctaggcttgccacaacttccgcctcctgggttcaagccattttcttttctcagccttccaagtagctgggattataggcacctgccaccacgcctggttaatttttgtatttttagtagagaccaggtttcacccaggttggtcttgaactcctgacctcaagtgatccacctgcctcagcctcccaaagtgctgggattacaggcgtgagccaccgtgcccagcctaactatagttttttaagttgtattatgtcttttaacttgtatttagatatcaattagtgatttttttcctttgattatcctttgattagaactattaataaaactataaggctgttgacagaacgtactttgctattaccactcatggtctagtcttggaagttgtctaatattaaatatttatgttcatataagtaaaacattgactttaaacatttgggtatttggcggggcctatttataatatttatttaatactgttcattattgtcttaagatcctgtacacagataattctttttataaaaatttttcttgtaaatattttttgttgtcacacaatagaatcatataaccagatcagtaatagacacttgggaacagtatgcagcactgttaggtcaaaacctcattgctagatgcagctttcttctgtaagtatggtttctggtgttttttcttctgtaattgtagtttctaaatttgtgaaagcgaaaagggaattgtgcttttcaaagaaaagttttcttcaaatggagtttttaaagttagatagcatcataagcaacacaggagaattcacttagctaaatttgaatgcatgtactcctcctacccccatgcccccaattaagacttatactccaagttttgtgtttataaaagattttatgccacatgcttcctgtctagtatataaatttaggtaataacacttaacaaatcccagaggttccagtattaaactgaaattaatgtgttgttttggcaggttattctcgttcaagttaatccaggtgagactttcacaataagagcagaggatggaacacttcagtgcattcaaggtaaggacatttttggtaaatattctaatcaaagatttttttctttatttgaaggaagtaatgtttttctgtgtgtgtctgcatgtaattttctagaagtaaagtatatcttggatattcattttctttttttttctgtcgcatggtctcaaatatatattatgatgttatccaaaggacatttttagtggtaaaatctgtattgggtatctgttggttagttattgctaagtaacaaattactccaaaatttggtggcttataacaacatttattaactcacagggggctaatggtaggaagttttctacagttagttgttaagtgggcctctccatggagaagtggagggagcttatgttaccgcagctggcttcagagccaataactagagggcaagagggagctagtaggtccagcccagactcaagagaagaaattatgaaagggcgtgaataccaagaggcaggtcattgggggccatctcagaggctgcccaacacaggctactctttggcccccgatgattcatgttccttccaaatgcaaaatgccccgtcccaagatctccaaaagtcttatcccattataggattagctcagagttcagaaccttatcatctaaagttccaggtgtaggtaaggcttttgggtgtagttattttattacagctcctagcacacttctagtgtgtatactaatgcctcttctgtatagttcacttggaaataaatgatgtaggtactttgatccatatggagttctgtgtaggaagatcaacctagatctgatgttagctggtaaacactgtagtgttaaaaggcactgtttatgatagctctttttgacagtgactgggattatggggcaaatggtaaatggcatgcaattgagatcagtattaggttattaattgaactggaatctaatctgaggctttactattaatacctgaacttgcttaccaatatacaaacaaactgggggaaatgccctttagtttcggtttcccataataagctgtatagaaacagttttttttttccttgcgtaatagtagagcatgttgctttgtactttttttttgtatctataagaacaaaaacttagaaaatatttcttgagaaatgagtatatttttaaagattcaaggctaatgagttttaattgaagttaatatgaaattatttaatcacttttattaatgatttctactctgcatttctctgttgtgtcccagaaattgatctttggaattctaaatcatttaaaatcaaaacctagtcttagtcgatgcacaatatggggaaacttcaggtcaaggaagagaagaaatatttttaaatagtatggactatagagtctttcacctatttgtagtactataataaacagataccgtgaacaattaaaacctcagaatcctacaaccctgtatcttaaaaaaaaaaaaaaaatcacactagaaaaactagatgaaagtcacctatatgggatgaagctgaagtttccagttcagtaagaaagcaattaagcctctggttatggtaacattggcaccccattaattggctagtacataatgtccctctacaactgagtgtgtgtaatagaatctataaaagcaaatcacttagtggatgaacatgcattaaaatctctttcattccacctaagtttactttttggtgtctaaggagtgtgtgtatgtgtgtgtgtgtgtgtatatatgtgttttttgtgtgtatatatgtatgtaatttcactgagttggccgctcccccacttttttctttttttaatccatgttataactggtgcactttgcaggaaatgttgcaagtatattgctctcttcacaaagggagctttgtatttattcatgatgatacttggagataagtgacactaacactcctaacagtgatttcaaaaatgcctttgaccaaaacagaattgtggagccattatctttggctccctccaggcttcctattctttgttctcttctgaagtctcagatactatggttatcttcattttggggagtggtggtacctggcccaattaactgaaatgacacaggatggaatgaggactaggacctggatccaggtgctttactagggtttcggaagcactggggcaataggatgaactgcagaaactggaaggaaagtcagcccagcaggctgaaccccaaattcagactcattgactgccactaatgtataaaaggcagtcactcaggcaaaaaataagaaaccctttatatgagtcccagtatgagttcgtgaatacttcattccagttgggtagaatatagcaacataaaatgtggcaataggcagtgtatttgtaaattccaacacaagttgctgtgtcatcctcacagtcccagtgattaacatcatctctaccattgctaacatttattcatctcaggctgtgctatgcattctttcctttagtgagtgtgtagttacacataaggaagctgaggcctgtcgaaaagtcacaaagctagaaagaggcagagttgagttttcttccctgctatgtctgatgccctcagttccttgttctgtgcctttatgtcagggaggactccattctcttgacaacagcaaggttaagttcctgttcctggagtaacaggattctgagctggatagcaggatgactacttagatacccagaatgagacagatggtttgcagaacaaaagtggttggtggagactgagtcttgggaataagctaggggcgagcactttgttaatgaagtgagatctactggttgagcagtgactagcagacagtgtgatgcagggagtattggtttagaactcattaaattatttctgccccaaatcaggtttgagttcagatttggggtggctcagcttccaggtggggcttccagctccagctccagctgttgttgattggggccagggagggctccagctccaggacaatgggagaggacttgtaggtacagtgggaggcagttctttgtcatttaaaaacctattaggaaggaatctgaaaatggtcacattgtaatggaaatttctgaaagaaatatttgtattttgttagggatttaagagatcaaaactctacttatgttctttgaacactggccaacaggcgggagtgtttttgttttgtttgttttttgttttgagatggagtctcactctgtcgcccaggctggagtgcagtggcacaatctcggctcactgcaaccaccgcctcccgggttcaagcgactctcctgcctaagcctcctgagtagctgggactacaggcacacgccaccacacctgtctaatttttttgtatttttagcagtgacaggatttcactgtgttaaccaggatggtctcgatctcctgacctcagccttccaaagtgctgggattacaggcatgagccaccacatccggcggtgtttttctaaattgaggggaaggtgatgggtggtggtggccttcctggaaattttgaagtcatacccattgattatgccgtggttgaaactgtcagcctaataactttgctattttaacaccagccttcagattagggactgctttgtggggatttcaggtagggaatggagttggttgctgggccttcctggaaactttgaaatcacattgtatgaggtcagtcctctttacttgtaactgaatttattagcctgataattttatctgtaggacatttgtgacaccactagaaagacctcagaagctcattgtgatctcattaaaaggcagcttggaagttgaaagcaaattaatacagaagaatatgggctgagtagggaagctcacacctataatcccagcactttgggaggccaaggcagaagattgcttgaggccaggagttaaagactagcctgggcaacatagtgagacccatctctaccaaagaaagaaaaaattagtcaggtgtggtggtgcatgcctgtagtcccagctgctcagaaggctgaggtgggaggatcacttgagcacaggagtttgaggctgcagtgagctatggttgcaccactgcactctatcctgagaccccgtctattaaaaaagaaaaaaaaatgtgtttttatgggaatgtccttggtgataaggaagaaaacacaggaagcatacaatatgctgtgaacgcagattcatttctaatggaatatttctcaatatttcccatgaaacatgaatcataggtcttgaaggggccaaaaaaggtcatagtttattctcacttggggttagcctatacctatggcatcctagacaaaggatttattttctcttggccagatcaaagtgtataaagagctaattgttaggaaaaaagaatcttagcaatcagtatgaattttgcctttgcttcagttcaggaattaatagagggcacacttgggtctctcccattattttcatatctgtgtctgggctgaggtgctggcaatgcagccttccttcctgtctacacatgccatctctttatctgctccctgtaaaatcctccagccaaaacaaacatcatgcttcctttaagactttaggcctctttcttccaagagctctctcagaccactgcctgacttttccctgaattctggaggagcaggtagaggtagcactacacagtctggttatatgcgtaaacctttccttagctctcgaattagatgtgaattcagttgtgacaggaaacagtgtatcttcaccctgctccccagccacacagcttgagaataattactgactggattcctgagtggctctggtattacattcaagcatgatgatttttcttttaaattttactcttctgatggcagtttaaagaggtttagttacgtgcttatagcagtctctaaatctcaatagaagaactttgaaatactagattccattgataattgaagttaatgagtttcctttagagaaatatgtttaaattctaaagaacttttacaatgaccctacattattaatactgtaattttttatttaagactattagatataaattgtgaggctaaagaaaataggtgagtgtgatggtgataaaaaatactgattaaagtaaaattcttaggaagcaccattatgttagtaaacagtaatatttaaagatacttaattgctaatagtttttgtccaaaataatttaggaatcttttaccatagcagttaatctgctgacttgtgttaagtgaatagagacctcaaaatgactaaatgacaacagaatgcgtgcagaggggaattctaagagggcactactatgagatggctgtagctttgaagctattcgaatgtgaaactttttccgctcttgcttgttctccataagacttcttcagctctgtgtctaattctccccctgcctcagtgagtgtgggaactgtatcgttgatgaacatcatgctctgcccagtggctctgtgaatgacaccattgagagctgttcaccatttctgaatttcctcatttgtctcccatcccccgcccctccatgtatgagtcagcatccagaatgtcacagggaccttaatgttacttgtttttccttatgtgatacttttgggaccttaacgttgcttttttttccttatatgatactttaagtgcatttattagacttgtttggcacactaaaacactgacctgtcattctttctaagaattttatgacaggtcctagggaatttgggttgtctcttgctttgtttagtgtgaaatgacaagaatggtgtcatagcttggttttgcaaactgaggtagactaaaacttcaaaagcaaagcatgcatatggtctctccctttaatacatactttgcatataaatgagaaattcctgttttactagcttaaaacccaggaagaggacctgttgcaaatgaagcttgctttcaaagattgtagtgaatctctgtcttggctgaaatttgcaaccagttttttgattaaaaatatttgggtgatttgaaagtaaaattattgtaacatgaatgcattaaattctgaatctttgccaacttttattatattggatgaattgttatttgactatttgtaaaatgtctgtattataaatggaaatgtttcttcctattacaagattaggattttaggagcttgttttctacataagaaactgccttgaaaaccatttctttttttttttgttttttgagacagggtatcctgtctcaaaaacaaagacctggctctgagacagacttgctctgtcacccaggctgaagtgtagtggcacgatcagatcatagctcgttgcagccttgacctcctgagctcaagtgatcttcccaccttggcctcccaaattgctgggattacaggcatgagccagtgtgcctgtccgaaacccatttctttagtatttggtggatttgtgagggattgctaacaagctgaaatgttattgtgaacacttaggcctcacttggaaaatcttctagaattgaaaatagcaagtcatttgccaaggctagccctagtgtcatggccatctttctttctgattgatccaaagctgtatatggtgagagttaatcctcccaggaggctctaagccaagatagtctgaatttctaggaaaatctgaattactctaccaactctccagcttaccttatgatacttaaatgttagcttcaagaccaatcagtcttttacctgtgtgtgtctgtactacaaatatatatttacgtgtgtgtatatatatttgcttcattagacgatttttccattttccatgattggatttacatgaaatttggagaaagattgaagaaaaattactttcagctttgtggagtactcttgatctctgaaatgtttgggggctctattttgcacatgacagttagcaattcctctcaacatggactgatgcacagctatttgttacaagtagacattccatacgctgacctgagaaacccttttacagacagcagcttgctgctgagtaactggaagtttaccagcaggtggtttccaccagggccggaaaatactgacgggcccagagcagaaagtccaggttatggaaggaatgagagcaaaggctgtgattgtacgtgcaactgtcatcttgctgggattgtgtaatgtcatgaggctgggttacgtcaataccaaactatgttgctttcctaggaggttttaagtccctctcaagggaggtactcagggtatatgctgcttcctgcctttctccttcttcctgtctcagttatcttgatttttatgtttattcttatatttacataagaacggaatgttaaacccttagataaaactgtcacccaatgttgtgtcatcagacttaagatgaattggtgttgagttctcagagtacagctctgtagtgtgaatccctggtcatttcgtagctaatgcttaacctgttagccccaatttcctctcttaaaatgggaacaatgatagtacctatctgataggattgtgaggataatccattgtaagtgtcattattcttatcatcattatctagttgtatacacagctttactgatttttcccccccctaaatagatggcatgattgtgggcaatgacttcattttcctacttgtagaaatcagttgaaattctagtctccctttcattgcttatttatgatagacttgctttcatagggttgctggtgatggcaccagttcaaacattttagatgaaggtttataagaatgtgtatactgttcagatatggggttatagctaaaacaatgggtccagtgttccatgaatttaaagtaaattttgttgtagatttttagttgttggttttcttttgaataacagccgttcactcttgcaccacgcctgagcagctatattcagagaaggctgtatcctcttattttatccaacaaagcagtttttctaatgtgcctccttttacattttcattgaattccatacttctggctgggcatagtggctcacgcctgtaatcccgacactttgggaggccaaggtggggcagatcacctgaggtcaggagtttaagtccagcctggccaacatggtgaaaccccatctctatttccccctaaataccaaaatacaaaaattagctgggcttggtggttggcacctgtaatcccagctactcaggaggcttgagacaggaggatcacttgaacctgggagatggaggttgcagtgagctgagatcgtgccattgcactccagcctgggagacagagtgagactgcgtctcaaaaaaaaaaaacttgtttccatacttgttaaaatttttatttagtgcattctgtttcttaggcagtaccaagaagcagtcagggctatatattgggaagatcattatagattttggagtgagattgcctggctcaaaaatcccctgcacattagatgtatattgtaaaattagttccttaacttctctacacctcagtttccttatctgtagagctggaatagtaatttctctctggaaggattgctgtgattaaatgagttattgtgtacagagcactaagaacaatttctgagtcatagtaggggcccaataaataggagtgattactaagctttcgctctttattatgggtgggcattgacccccccttcattttttgttagctaatcatttttaaagcatttcagaaagcctatgcgaactggagttattaggattttttagatgtcttcacgtttaaattctaacacttcaaaataacatgtttaaaagttatgcaatcgcagtttaactcctcaacccttctgccctttaggcttgttaaacaatgattaaaatgtcatctctgaaggtaccactgcttagagttctttaaatgtcacagatctttgcatgtcagataattcagaaaagcgagcagtgtcgcattacctcagtggttggccacaggctatttcacagcttgtagtctttcagttcctgctttattctttctgtattttttactcttgttcttgcacttccaacctgaaatagaaaagttcatgttacaagtgtctttaaggaagactggattaagttcttcaagggcaagggtcaaagcttagtcatctttgtatcccagagcctatcctgcatgcaggaggcattcagactgaaggaaagtcatttcctgatacttgtcttagtctgtctgggctgctataacaaaaataccagagaccgggtggcttattaacaacggaaatctatttcctacagttctggaggctgggaaatccaagatcaagatactagcttctttggtgtttgaggaaggcctgctttctggttcatagatggcagtttctctctgtgtcctcacgtggctgaaaggcctaggggtcttcttgggcctcctttataaggacactaatccctcatgaatggggattagtgtccctcatgatccagtcaccccttctagtaccaccccttctaataccatcacctttggggttagaatttcaatgtatgaatttgcgctggggtaggggacacaaacattcagacagtgatagtactgctgaagataaaatgatggaaaaattctcttaggtaatttagagaagttatttatttttgttgttctgaaaaggtagttaaatttagttattttcactcttagttcctcaatttaagataatgaatacaggcatgagtgtgtttccaaaaacagtaattctgaaaaagtccaatatatggattagcttctcttacctgtaaaaatgcatgagggaatcattatattcatgcttttaataactttattttgggggagaataggatgggaataccttagaaaatgttaggctatttaatccttaaagatacatcaactttttcccaaactttgtatttatttttgtgttattaacaaatattttaggttactcgttaattttattaatattttatgttttcttgctgttggaaattatagcgtttatgtatagtaataaattctcggtaaactctgtgtcagacccaggaacaaattatgctttagtaaatgagggttggggcggtggctcatgcctataatcccagcactttgggaggccgaggcgggcggatcatgaggtcaagagattgagaccatcctggccaacatggtgaaaccttgtctcaactaaaaatacaaaaattagctgggcgtggtggcacacacctgtagtcccagctactctggaggctgagggaggagaatcgcttgaacctgggaggtgaaggttgcagtgagccgagatcgtgccactgcactccagtctggtgacagagtgagcctccatctcaaaataaataaataaataaataaataaataaataaataaataaatagtaaatgaggctcattcgtgcttgtcagtgtttgcattgatgtaaagaaatacttgagactgtgtagcttataaggaaaagaggtttaattgggtcatggttctgcaggatatataggaagcttggtgctgggatctgcttctcgtgagggcctcaaagaacttacaattatgacagaagacgaaggggagccagcgtgtcacatggcgagaggaggagtaagagagagaagggagaggtcccagactcttaaacaaccagatctcctgtgcactgaatgagaactcactcatcaccatggggatggtgctaggccattcctgagggacccatcctcacaatccagtcacctcccagcaggccccacctccaacgttgggagtcacatctcagtgtgagatttggaggggacagagatccaaatcatatcatttactgagttaaatgaaggtggcataatggtttttctctaccagcggtgtgattgaagagggcaggcaggcgtcgagcctgaaggagtgcattcgtggtgggatgtggaaggagaagcagatattacagacatttaggagatagtcatgacttgtgaccagtgagaacacactggatgaatgtttccctaaggtagatgaactacagtgtcttagaaaaatatttgtcttgtaacataattgagagcactaaacattttgtattctctgtctcttaattggacacacattaagagtaacaaatatgggtttaaaaggcaaactttttttttttttaagtgggtatttttttccttttcctcaacttgggtatttcctctctgaagagggttttcagtgtcttggaaggtaatttgcacactatttgtgaggcaagactgctgagttaatggggaatatgctttactacttcttttttggatccaatctaaatacggagaaaactggcctcagaattgcccacagaatgggggtttcctttatgattcctgcttttgagttctttgaattagcttcacatttcttgtgtggttggatagaccctcctccccctaccacttttttttttttctatttgaagagaaaagattatttcccccctaagtattcaagtctttttgtgcctgaattaaggtcgaagcattccataatttaaatataatacctttttggatgctttatatattgcattgtggagccagttttaaacacctgttttgttatctttctagctataggagtgtccacatcttcactttatttaaaaagctcccgggtatgtattagcagattattatttctgttccaaattgataagaagaggagggaggtgtagcatcaagggagaagtctttgggagtaaaaaaaagagtggaaacttaaatcaaaatataagtccttttcttgctctgtcttctagtgaaaatgttattctgtgttagagaaatgaccagatgaattgtgtttcctgtttcgttttgcagttctcattaaagtgggtatacgcatacacttatctcatgtaaatgtcaaactgtttgttcttgaagtgctgagtcttcaacagttctccttggttggattttgaacatcatttcagaatgtcttatgctagatccagcaatgtcagtttttgcctgctgcactgtggtaccttgtgaataaagcaagtataaatggtccagatttataatggtttaagatttttcaactttacgattgtttcattgggacgtaactcggtcacaggttaaagagcatctgtacttaggcaatgctagaactgagcttgtgttctgttgaggaagagtaatctttgcagatagtataaattgtctttgagtgtaaacttgaaataggtttctttctttttttttttttttttttgagatggagtttcactcttgttgcccaggctggagtgcaatggtgtgatctcggctcactgcaacctccgccacccgggtttaagcgattctcctgcctcagcctcctgagtagctgggattacaggcatgcgccaccacgccccgttagttttgtacttttagcagagaggaggtttctccatgttggtcaggctgatcttgagctcccatcctcaggtgatttgcccgcctcggcctcccagagtgctgggattacaggcgtgagccaccgtgcctggcggaaatagttttttaaaaacattaataaaatatataaaaaaaagcatggcactatcatcccatgagttagaaatcaagatctaggattaaattggttaatttattcttagttaatagtcacgacagttcttattctgtgagtcaagcgctcacctgttgagtgacatagttcttgaatcatatgcccaaggaaaaggacatgtctaacatctcagaattttaaaactgtgtgtattaacagtggcttatatccttttgcacatcagaattacctgggaacttaaaaaaaaagtttaaaagttgatatgtaggctagttgtagggaagtgtcacattgtctgagcccaggggaattgtcagattgtaggggaattgtcagattgtaagggttggggactgggcatgagtggttttgaaaagctcccgggccatttgaatatgtagtgaggttgagaagctctggttaacgtaaccctcaggacagctcaagaaattcttgcactgtgctttcccacgtacatttcagtgtacaggctgtgtacctgtggctgtttatcaggttcatcttctttagcaagtttggcagttttgtaaagtgtctaaagatcttttatcttgtattcttatacatattaagtaaaatctatgtggtagttggctttactgaacctattaaaattgctttttagctttggttataagcttctaagtaataaacaagaaccatcagacagaaatatgagttactgctttcggcagagtacagatttactttatacttacttagatgtaaacacaatagttcacgtatgtttaacgaaattcaaagttcacctatgtttaatgaaattcaaagttgattggaacaggtatgattatgcagagtggacagactttaaaaagtgagatgagaaggccaggcgtggtgcctcacgcctgtaatcagcaccgtgggaggccaaggcaggggaatcatttgaggtcaggagtttgagaccagccaggccaacatagcaaaaccctgtctctactgaaaatacaaaaattagccaggtgtggtggtgcatgcctgtaatcccagctactcgggaggcttgtggcaggagaattgcctaaacccaggagatggaggttgcagtgagctgagattgcaacattgtactcgagcctggcgacagagtgagaccctgtctccaaacaaaaaaaaaaaaaaagtgaggtgagaaaataaccatcttacaacttgccacttttcagaagctgataagctgctgtgagccctgttttcgcatgcctttatgaaatgattggactgggacttttgcttccctctttgttcccttcctaatctagctcgaatggtgtaggtccctaggaatcattttgttgcttgacttgggtgggtggtccctatagtatatgaattcagtatatgacatctatgtcagaccctaaagattatcaacaggtagtctcggttctcaaaatgtagcataaaccagaatcacctggagggcctgttaaaacacagttgctggttctacccccagggtttctgattcaggtctggggtgggtggggccagaaaatttgtatttctgagatgttcagggtgttactgatgttcttggttcaggagttctgagactcatggaggtggagatcgtcggggttggtgacatttgtaagagaagggtatttacagaagttgtacccttaaattaaaaagaaggctctcagaattaagtctggtcacccaatggacaaaagggaaaaaaattccatctagatgcagaaaaataagaaaaattgacttaaaagattattatttataagctcaaagatagaatttttttctttttgaaaaatttttcctcccttttctacagttttaatgaattgaggtttgaacccgggactctaattttcaaaggatttgtttgtagtctttcagtttccatctcctaattcagttgctaattttattaagttcctaattttattaggaacttgtttttcttcactgtgcctcagtttccccataataagaataaatatgattgccagagatatcgttaggttattttaaagtctaatgaataatattatgtagtatttggagatcatcaagttaggaaacttataaaaaatatgaaaaatattctaaacatctaaataagggatgtacttattcaagcaataagtacatccctttttcccagtcaactgggccacggtaaaagaagcagccaatgtggagggtaaaaaaaatagtgggccaatatggaagttggcttcattttgtaaagtactatacaaaaatgggaaaattttaaagcatgaaactggtgagaaaggaagtgactcagaattcaaaatagataggactccacaccagtaatgatctggaactgaggaacattgcctacagaagagagaagccatgagagacagttgaggtgagtgaattggctccatagtaacatggaaaatggaattacacatttcttttttttctcacgtggacagagactattgtagcaatttagaacttcgggccctgtttaaaaaaatctatttcaagcgtcaaattattgattgccagactgagtattattagtaattacagttacagcactgaggagttttctcatagtgtctgagttctgctcctgttcagtggttgagttcattgatcatttttctactcctcattgcacctgtcatgctggtatcagcaattaacattcctcagaagcgaatagaatgccaggctccatctcagatgtaactcaagaacaacaggtgcattctacctattcttggctatagacagagtagttagaaggcaagtaattaaccatagagcagactttgaagaaaatgagattctttagaatttgagacaaagtgctgaaaagtagctctggataatgtatttaggagacataggaaatggctcaacaggaagggtgaaatagccttaccagtctggcctctttaaatttgtttcaagcctgtttcccttcactgatacaaatcttactaactctgcaccttccacagaccctttgttatgtgcagctgtttttgtttgtttttatgaaattcacttgaaaagtcattggacttgaatttatacagtaaaaaatcaattaactagattcttaaattttctcttccactttaaatgaagacacctaacggtttgaaaccttctggctctgagaagaggaagagggtccccagatacaggtttcaattccttaccatttagtctggttccattgatcaggggttcagttttctcaccttaaaataagaggattagaacagataatttctaaaattatttttaccaccccttttctcttttctttctttaattcctgtggcgttctctgcagtttatatgtccctaatttttatgaaaatacttaaagctttacttaaataggttcaagtgtgggcagatttcaagagcttaattatctaggattttctacttgaaagtgagattttaaattatcattgagaccttactttaggtcctacataaatttctctaaaattttataagcatatgttactcttgactagtaacaacaggaaagaaaattaatccagtgtgatttctcttgttttaataattgctactttaaaaaagcttgtgtataccttttgtatgttgggtgttttttttttttttttttttttttttttttgagacagagtcttgctctgtcacccaggctggagtacagtggcatgatctcagctcactgcaacctccgcttcccaggttcaagcgattctcgagcctcagcctctcgagtagctgggacttcaggtgcccgtcaccgtgcccagctaatttttgtatttttagtagagacagggtttcaccatattggccaggctggtctcgaactcctgaccttgtgatccacccaccttggcctccaaaagtgctgggattacaggtgtgagccaccacgcccagccatgtcgggtgctttctctcactggttgttaaacttggctgcatgtttgaatagctagagatttttaaaaaatactgatgcttgggcctcaccttcagagatttagatacaattattgggtcccagaatatttttaaagatagtattgtcataagtatttagtttacgttgcacttcaaaaaaaattgtagatttaacttttatgtctaatatttaaggttttgaattatttgtgaatgaaaaaactctaaaacagagaagtggtaccttttcattttaggtgtactgcctcagctaaaggatgtgtgtgtgtcttgactccccatcccccatgcgtacacctcttatctgctgagctagatgggatggcctttctgcttgtctctcatctatggggcattacacatagttgtccttttccagttggttttttaggattatttggtgtcattttgtcaaatctatgccattggtttttaaatgcatcattctttttttttaaatgtctctacaaaagagataacaccaccgattaagttgacttcctttttcaggagatgtgaaaatgtgaaaaaggtacttggaatcggtgaaatatgcttataattttttatttaaaaaaagtttgtgggtacatagtaagtgtatatatttatggggtacctgagatgttttgatacaggcatgcaatgtgaaataagcacatcatcgagaatggggtgtccatccgctcaagtgtttatccttcaagtttcaaataatccataaaatacactactctttatttttctcatctaggtattttttaaaaaataacaaatctacataggttttttttctaagtttgtgtttgcataatcattttgtgtgtatgaaaaaattgagatagctttctattcaatctccttagttgtagaaatatgactaatttgtttaaacatcattgcttctaaatatgccctggaggacttacatacaagtcataatcttgtgatattctttgttagtttgtctcattatgcggaaagccttatttattttttgtgtgtgcatatgtatgcatatttgtgtgtactcatacagacacacacactctgtatgtgtgagtgtatatttgccagtgctaccacttccgtgtgttctgctttgtctaaccttttggtaaagtctacactttgggttttaaataattttaaggtttccattgttcacgtgtttgctgttgtagcattatcctattaaaaactacataacccagttcagcaatctaaatgtgcttctaactttatatggaaactatttagctttctttacttaccgtctccccgactccactccccactcccccaacctctttttttttcctacagtgttaaccaagagagatatattacctttggatctagcccatctacctctagatacttcacttgcataataactaatttaaatttattccagatgtacaagaagtatttgagatttggtagttttaattttggaaatgcttttaaaatgttatcctagattagtaggtgatttttcttccatgaaaatgtatatttatttaaaacctgcggtagctaattaaacttgaaataccctaagtcctcatgtaatgttgtggataggttcttggaaactgtaagtgaaacatataacaggtccttgagttgcgttgtttccttcgatgtggatttgttacagcattgatgaggggaaaaacggttatgcgttatttcactcaaagttgcagcttccaggaacctgtggatgacgttatgtgagggcttactgtatttctctggttttcagtaagttaaaaggtagcagaatctaatattttcattctccccatcagtagaggagctggtgatatccacttgtggatactcagtccctgtctgatcaccaggtttgatgaattggccgctcactttagagggtctgtcaggcttcttcatgttcacaaatgactggaaataaaaaggaataccttttacatcaccaactctctaagtacctatataacatttcggtttgttttggctgccaattcctcttcacaaaaatcgctggttttgcagccataggtggcctcctggctctgtgtggttttctccctttactggctcactcttcatgcccatattgctgtagacctctcttagaagcctcaccccttcactccccactccttttgcatttgggtttctgtgtgtatgtatggggtacttaacgccttctaagtagtagcgcagtgcctggcaaaattgtcagaatcaggatcagaatcagactgcctttgctgtgtttccacgggtgtgttgcattgcttcctgtccgttctccatccattgcccattctccgtacccttcatgtcctcaactactccctgtcttcacctcctgtttcctgttttttctcctgtttctgccactcacattctccatgggaagggcttttttttttttttttcttcaaacctggtatttttggagagaaggttttgacattggggctgtcttttaagagcccttcccctgatagcagaggggaacgtgctcaacttacaaagtttctgaaaaaaatcacacttcttcttttcacgggacccctgtttgaaatttgcaacaaattaaatgcttaggaatccaggtgcctaggagccctgctatttcagctctttccccttaatcatgttggtttacatgaggattgattttggactcactgggccagctacgtgaaatgtggtattgtcattgtctctttgcacagaacaattcatttgctgcttgtcgtgaatccatcctgtgaggtattatgatgacatctggcatggcttctttgtttactgtgtttaccgtatgtgtttagaaggaaaaaggcctgtagtgaccacttttctgtgtcggcccctgggtcaggttttccatcctgactcatgggtgtcgggaccgctgagattggttgatggggtgtgcagaatttcctctgtcgggcttgggagccagaaagccacgatgaagtttgatttggcttgtggcagccttttccaaatgtgaatttggatacagtacagtaagccctctaagaaaaggagaagaagagaaaataataactctagagctgggaatatctggggaacattgaaaaacggggaaagtctcaaagatagtattctgtgtctcccctgagctggtgttgctgtagtgctcagaggccagcctttttttccaagccgagtgctccctgcacttgggagaaaccacagaggcggcctctgtcctgcatgtgctgcacgctgccttgctccagactgtcttgaatgtgacctggcagccagtgctgtttcctgctgacgtggcctcccacaactgagcagaacagagccacctcagtgtactgaggaaggagcaggctgggggcatgaatcaccagcgggatacggaacaaattcagaggggaaagcgcctaactattcaggtttcctggtagatatacttaaaagacacctttcttataggaaggaaggaggaggaagaaaaacaggagtgaagaatgcctcaagagtcaaacagtgatttgtttggccctaggaaggatttcttatcagcaggagttaccttctggggtaagccccagtctgtctcaaacatctgagaggatgctttgaggaggccagactggactgcagccttcacagccacactgttgcacaggttggtggcgatgtgagctcttagccctatcctgcagacaggtagtaaagaaacaaaaacctaaaccaaaagactagagtttgtgtcttggtggaaaaagttccctcaacttggtaggaactggagaaaaggactctgagaaactgctcaggagcaaatcctgtggcctagttttcccttcagtgctgtcagcttcccgcttgatgctcgataagcgcttgtttcagccactactgaatattttttgagtttgcttatttgaaggcatccaggacagctccttgttactgtcttctaataggccccccaaaagtcatagtatcacagaattttagagtgagatgggactttaattgtaatctgatcgagaccgttaatggtttctttttttttgagacagagtcttgctctgtcaccaggctggagtgcaatgttgcaatcttggtgcactgcaacctccaccttctgggttcaagccattctcctgcctcagcctcccgagtagctgggactacaggtgcgtgccaccatgcccagctaatttttgtatttttagtagagacggggtttcaccatgttggccaggatggtcctgacctcgtgatccgccgtcctccgcctcccaaagtgctgggattacagtcatgagccaccgtgcccaggctatggtttcttctaagaagtgatcgtagaactttgtcttcagttactcccacctgaaagcccactgtacaaaacgtgcaggtggagctgactgagggcagagaggccggagcccagctgctcatctttcttttagtagtggccctggaaactcttcccctgaccattccacactcccgcatacttaattgagaaaccactgatgaaatctacaaccttaattttataggtgagggaattttacctttggtagggtcacggtgttaggtcattatgataactttcaaggtgcctgggaataaaagttttataactttaatctgtctcctgcttttgagccttcgtgatctctccaggagctgctgtaatggcttcccaccctgcgtgggaacaagtggggtgctggtgggacaagtcgggggctggtgatgtactctatgtgtttgtaggtcagagctggaaaccacagagaacagcccaggtggtttcattagtctaggtgtgaggtcactggggggcggcagtaggattggagatggagggaagctttgaaaggaagagcccttagcattttaaagtatggttaagtttttaagttacagaaactggatatggaaaattaccaagagaacttagtcaaagatgatcctcaaatacccagccaaagtcatagggagaatgtggagactgtctgacttagatagtggaaaatctttctcagttttctttgtttaagcttcagtaagtccctctcgtggaggattcttctttggagataggaaagcagtttgattccctgattctctttacagctgtggcatcccaatctgattgttggatgagttttggtatatggtgtaacccttagttcctggtgtgtcagttgtctacacaattcacttgcatttgttttctggattgttcagcctagattatggaacagaaccaaggcagattcaggtctgtcatactgacctcattcctggttcagcactgactttcctgcatagcctcaagtctagtaggtaggtggacttgtgattacaaacagattttggaaatcatttacattggccaggttttccagtgttttcccctttcctggaagccattttctcctattgctcgcctctaactcagtcaacagaagcctctgcccagggcaaacaattttgtaagaaaagagagcaaaataggagtgaatggagaggatgggatattaaatatgtaataggcctatttccattttcagtaaagtcacttgatttcctttaaagaggctctgattttcttgaaccatgccttggtggaattagaaagttacccacatcatttatggtattttgttgttactgttgtaggctggatttgtacttggtccgggactagaaggggagaaacagccttatctgttaatccgttgcagtggcagaagagctgtatatgtaactatatgcttttttcctcaacttatactggaaaaagaaaaaaaattgcccagagactctttttctaaatggttttggtaaatgtattcttcaaatacaactgcgagtaggaggccatgtcagtggggggtgatcattcttttgtgtgatggtaatgagataatttctgcattacagattttcaggagactctttgtttaaatgaaacttcagagccctcacaaagcctcacaagtctctttgccttattaaaaaaagtttttattaatctcatgtgttttgccatcatcaattgcataaacaaataaaattgttttgagcaatagaactaaggctgtcatttgtttggcatcctgtcctctctcctttttctcaaatacaatttgacaaaatctggctccgagttgctgttgttcccaccattagccatcggctccaagtggccattccctctggtcttggatggaggcaagaggaagtgtgcgcaagacatagccaggcaggttgctgcctgaaggctggcagccgctttcacatgggctggcagggatctgcagccagcaagtgactggcacaggaatttccgttgcgttgcaagaaggaaccaggtaggcctgagggtgtcaagttgctagccaagatcttcaacgtttctttgtatgtatcctttgctaattgaacctggaaaacctaaccatgaaagggatctacagagaaaagtggctagtgctgagttttgaagttttttttttttttttttccccactgtctgctctctaaagcaaccagtatttatttggttaaaaagcagctaattaatctgtttgatcttgatgtggaaatgaaccgtatcgaattccaggtcaaatcacttatccttgtagaatgtttttttaaccttttgaggtgtgtttcatcagattacggactatcagaagtttacttgtcctcaatattccggtctgcatggtgacatggctattgttctaataacagtgcttttaagtataaacctaatattgtctacaaaaagaaaagtcacatttatcaatggactgtgaaaagttgtaaggggattgtgtaacttaattatacaagcagtgtcatatatgatactattcttgaaaaataccttgccatctggtcccatttatctgagatgagatctgttgttatttttctttttctcttcttaagtttcgctaagctgccagcaaatattattttccttattttaaacatgaagaaacaaaggtccagataggccaactaacttatccaaagtagtggtagagccagaacatgaacccaagatggtaccaaagctcctggtattttttttttcaaacttttattttgaaataatcatgaatttttaaggagtggcaaaaaatgtgcagggaagttccatgtatctttcacttagttttgcctcatggtaacatcttgcataactatattttaatataaaaatcaggaatagacatgagtacagtccacggaactcattcagatttgtaataatcactaccataattaaaatatggagtggttctagcaccaaaaggctctcttgtgctagcccattatagccactcccctttcttcctgctatccctaactcctagtaaccacccatctgttctccatctctaaattatttcaatagtgtcatgtaaatgaaatctcacaggatataagtttttgagattggctgttttctcagcctaatttctttgagatccatttgttttgtgtatcaatagcttatttcttatattgctgagcaggatttcatcatatacatgaatcagtgtaacctgttgaaggacatttgatagttctggctttgcttgaacatgacttttagttttttgggataaatgccttctgaggtctgaatgtttgtgttcccccagaatgcataggttaaaacttaacctccaacgtgatggtattaagaggtggggcctttgggggctgattttatcatgaggactcagcccttattaatgggattagtgccatgattaaagagaccagagggacctttttcactccttctaccctgtgtggacacatggaggggtgccatctatgaggaacgggctttcaccaggcattgaatctgctggtgccttgatcttggatttcccagtctccagaaccatgagcaatacatttctatcatctctaaattaccttgtctatggtagtcttgttacagcagcctgaatggactaagacagtacccaagagtacactgctatagcctattattataattgaatgtttcgttttataagaaactgacaaaattttccagagtggttgtactattttatgtttctatcagccatgtacaagtgatcccgattctcttcatccttgtcagcatttggtctgatgtttttaatggtcactgtggccttgatttacatttcttcaatggctagtaatcttgagcatctttcaatgtgcttatttgccttccgtatctcctctttgatgaaatgtccttgtttttcacccattttctaataggattgtttgaattttttttttaactgctgagttttgagagttcattatatattctagacacaaggccttttttggatatgtaatttgcaaatactttcttgtctttccctcctttaacaggttcttctgcagggaaaaagtttttcattttgatgacatccaatttgacaatttttcctcttatggttttggtgtgaagtctaaagacctttgtctactcccagactccaaagatttttttcctttttgttttccctacaagttttatagttttacatggaagtctatgattaattgtgagtaaatttttgtataatgtgtgaggtttaggttgaaaggctcttcttctctttctcctcctccttccctcccctcttcctctccctcctcccttatcttcctttcccacctcctctatcaatgtccagttgctctagcaatattttagaaaatactgttttcctcccttgcatcacttttcacctctgttaaaaatcatctggggccgggcatggtggctcacgcctgtaatcccagcatttgggagaccaaggtgggcagatcacaaggtcaggagttcgagaccagcttgaacaacatggtgaaaccccctctctactaaaaatataaaaattagctgggcgtggtggcacatgcctgtaatcccagctactcaggaggctgaggcaggagaatcccttgaacctgggaggcggaggttgcagtgagccaggatcgcaccattgcactccagcctgggcaacaagatcgaaaccctgtctcaaaaaagaaaattatttgggtatattggtgtgtgtctgtttccaggtcctctgttcctggcttggttgaactgtgtgatcactgtatccctcctcccacaccacattgtcttgattactgtagctacatagtaagtcttaacattgcatcctattcactctaaagtgaattttatctgagatatttaggtaaataaggacccaagagagagatgccagctctccgtaaactagtgcctataaccaagagttatttaggagctttgggtcatctccaacttattctgagaaaatcagtaggaaaaccacaaagtaaatattcagaaaagtgaatatgagttaagtaatttggtttgtaagtctaaagttctgtacagctgtctctgaagcctggattgataatgaagtctagatctttgggtttgtttgggtttgtcagtaatagctattgatgatcaaaaaagccatatgagcaaaaggttttgagaaaaaagttaggttctggattcattttaaaaagttagccactcgtttgtgtattttaagaaatctcatctgctgtactgaagccttatatatgttcctttatcttaagataacatagatagtacaccattttagacttagagaggtggtagaggtcaattcatttaaccatcacattttacaggtaggaaaatcaggacccttttataaatgggctggcacatctgcagattgtcctgggtcactgggaaggtgggggaggccggcaggggctgaccagaatcagcctcaccagtggatactctgtcagccttctcgcctgcctgtaaacctgttttcactctttttcatctggcatggtcctgaagccaagggcagcagtgggcattactattacacagtactacacactatacaaaactatgcctccttccagctccctggaataggaacctctgttcatagacctttgcctggaattagactgaaataggctgtgctcactgggccttgcctgttgtggattttggcttcccacttacaggggcggagctgcctcttgtgcctcccagggactgactttgcatttcccttggctccctctctgtggctttgttcctcattttcatcaccagcctgctactaggactggtccctgctgtggttatgttaacatcttctagggtttacaccccaaccctaagaagtcatgtgaaatcttacagaagagctgctaacaatcaagggcatgaatactgctttccgaatttcactaatattggccagctccttttagagttgccctggaacagagaaatttacagccaactgtaaatcagaaatgtcagtttgggctagggggccatgatccaatagtggagcaagattaatagaataatctatacgtattttaaagtatactcatctataaagaatagaattaaacttttattgttataatattggcctttggttatttttatcaggttttaaaaataaagatgctgcataatagcaaattattactaaacatttatattggccacaactgtcataaatccagagtaatggaaggaattcctatttttgcctttggattttattttatttttttgtcccgaatttgccgttgaaagaatttttgtgaactttccaatgtgcatagtatatatcaagatacaataaattcaaaagaaataaaagagaaacagcataagattaccaaaaaaggagggaaccaggagtaattttgaattttacttttagaaagtttgttttttaatcttatttttgtcagtgactattcttggtatgttatttctgtaatttcttagttgtgttcattattaactgttatatagaactgtcattagaagcaggattgaaccccattggaagtgttttaatttcacatctgaatttgagcaggctgttgaatattggtgggatggaatgtgaaccgactgatcgcttttccaatcctgttattttccagtgtggtttggaaaaaaatctctacatatgaagtcaagaaagcacaatgaagccttctggttaatgaatttagtgagtttcagattttcctctcatggagagtcctggaaaatcacttcagaaaagagtgctgtgggtcacttgtagaagaaactgctttgcatgcatatatgatttagagcattctaaaggctaacatggattctggcccagcctctgatgaatagaatcaaaacctattgattaccagaccaagaattggaaacaaagccatttgatacagcttttaggtttatgactagccagtcagatctctctcagctgctgaatgtagaagttcactggacacatgcgtgtatttaccgaagcctgacaatgtctgacactgttgtgccttgactgtggtagtgatcacctgtaatgcaatttttcataacaattttgttgagatataattcacataccatacaattcacctatttaagcatacagttcagtggtttcatatattgtgtatccatcactacagtcagttttggagcattttcatcacctacaaaactccattcccattagcagttacccctgattcccctacatccccagcactaggccaccagtaatgtaccttctatctttagagagttgcttattctgtctggacatttcagtggaatcatatagtatgtggtattttgtgattgtcctcttaggataatttttttttttttggggggggacagagtctctctctgttacccaggctggagggcagtggtgtgatctcggctcactgcaacctccgcctcccagattcaagcgatttctcctttctcagcctcctgagtagctgggaccacaggcaatgcgccaccatgcccagccagtttctgtatttttagtagagacggggcttcaccctgttggccaggctgttctcaaattcctgacctcaggtgatccacccacttcggcttcccaaagtgttgggattataggcatgagccaccgcgcccggcctcttagcataatttttaagggtacttgtagcatgtgtcagttcttcatttttttattgccagataatattccagcatatggatgtatcacactgtattaatccattcatcaactgataaacatttgggttgtttcccctttttggctattaataccgtggctatgagcatttatgtgcaagtttttgggtgaatatatatttttattactcttgggtatatacctaggagtggaattgctgggccttatggtaactgtatttaaccatttgaggaatggccagactgtttccaaagcagctgtaccactttatcttcccaccagcagtgtatgagggttcccgatttcttcacattcttgtcaacacttgttattacctggttttttttttttttttggtctgtaatacaattttatgtgttttttaattcctttgcattgttgatgtttttcctgccagggatcggcattcacatacttaaggaagtagggtatggttagctatgatatggctctgagctgtaatgaaattctgtgctaggaccagcttgtctatttgtctcttaccttgacttctgatcatagcactaaccaaaccaccatgataccacagaaataattgttttagaagctcaaatctaatcttttaaatcttgagatgtgtcacacatacataagaatgcataaaatatatgtataaggaataattaatagctgggcatggtggttcatgcctgtaattccatcgctttgggaggctgaggcaggaagattgcttgaagccaggagtttgagaccagcctgggcaacgactctgtctatacaaaaatttttttaaaaaaattaactgggcatgatggtgcacacctgtagtcctagctacttgggaggctgagatgagaagattacttgagcccaggagtttgaggctgcagtgagttatggtcgtgccactgcactccagcctgggcaacagagcaagactatatctcatataaggaaaaaaaaaaatagaattataaagcaaacacccatataacccacccacatcatagagtagaaatttacagttctaagtaacagttaataatgaacatgactgaaaatatgttagcattgtaaacattaataatcattaacaaattaaatcactttttgatgattttccttttctttgtatcattttgtttttctttatagttttactgtatgtacaaacacacacacatgcacgcacacatgcatccaacaccgctaccccaaaacatgagcttgaagttgcctgtttttgaacttcacataaatggaaacatactatatgtattcttcagtgacttcttttgcttaacatttcaaagatattgtgggtagctgttcgttcattttttttcttttttgctactgtgtagttttctagcttctgtgttctcctgatgaacctttaggttggttctgatatttgggtattatgagcagggctgctatgaatattcttgtggatatttcaggtctgtaagagtttcttcaaaatagttaccaaggagtagaattactgctttcctagataatgccagagtctttttaaaaatgttgtaatcttttctcccacagcattaccagcctttggtacattcagacttttagcagttttgacagtctgttggttgcttctgtagcagtatctcattgtggtttaaatttaatctcgcttgagttttattattacttttaccttttcacccagtgcatttgcagttatagatttttttattttctcaaagaaaagtggacattgggctacctgaaaatcatatttgggctagtgaaaattcattgagctagtagcattctttaggttattctgactgagaacttgatcacttagatgatgagtactgtcagattatttttgatcctatggttttatctggccttacacatttttgtataataaaatttaaaatttatggaattgcttatttagtttaccaacttgatatgctacaagcaataagtctgtagtttgctcatattgattctaagcccaatatataaattgtcatttatttatggtgaattaagtatttatccctaagaggaatttacaacatctagttcaaagtattctcaatattaggaagtaatacctatatgtgtgtgtgcatgagtgtgtcagagtgtacatgtgggccaaagtgctgaaagatgtggcattttttgccagaggaagaagtttactgaggaaaactcaatattctaaaacttaaaaaaacttaatagtaatgtaaaacaaatcttgcttaatttaatgagaacaaataagattatttaagtgcgaagaaatggggtgaaagcagaattttatttgtatgagattaagaattgaccgaatactcagcatatgacttctatgagagcaaagtttcataatatgtagtgcattctcactggagcttttgctgttttgtttggttgtttgttttttaacttaaaagaaataactacaagtaatatatcatcctgtcaggtgattcgtgtactgtgttagaaagaaaaggtaacaaattactgtgtttatttccagttcctgaatgtagatgaatttaagtttgttatagggggaaatattttctgtctcattgcaagtgttctattatggctttcagttagcaacacgtgctcaccttactcttaagtattatatatttttcaagatatcttaggaatagttatggttttatttgtttgtttggacatagaggttttactctgtggcccaggctggagtgcagtggcacgatcatggctcactgcagtttcaacctcctgggctcaagtaatcctcctgcctcaggctccggagtagctgggactacaggcatgcgccaccatggctgagttttgtatcttttttagagatgggatttcaccatgttgcccaggctggtctcaaacttctgacctcaagcaatcctcccacctcagcctcccaaagtgctaggattacaggtgtgagccaccacatctagccaggaatatttatgttctacctgctgtaagaaaagcctacccaaaagtcaattctgtatgtcaattaatttttttgttgatggagagggagtagtttcaaggaaaagtgaattcagcagattctttactgacactgggaatctaaatgggactgctgaatagctttccatttttttgttttggttgtgtgattgaatatgttttataccaaaatatagtttattgttccatgaatatatttaataattgcaatatcttataatctcactctagattgaattttcatactgtagattgaactttcatactgtactatacagagtagaagtgagttttcatttttaactacatgaaatctcagttctaaggtcaataaatttttcttctgtttcccacaagtaagatcccattatataaaccatctcagaagatgtccacattagagaataatgtttacaagtagttaccaaaatgagaaactgccaggcattatttacttacatgacacgaatgttcactctcttgaattttcctataatattcataataattacattagattcagaaattcaggaatattttaacatacatatgtactaaaaaataccttagttatcagaagggagtgtttcattttgttcttttaacaaatggttgcttttattcttttgagaatatttgtttcctaggtgaatgagagctaatcttttatgcatgaagggcctaaagtgctctgatttatattaataaatatattgacaatttaggaaacatagaatcctttagacctttcctatagagaagaagagtagtctttgcaaatttgctttacattggtgaaaaaagtcatcatttcgaagccactcatttcatcggaattgggaaggccaccatcttatagctgggcttgtgaacctttgacttttcccagtatatattggactattttgatcactgctatatgcttctagttcctcaatcagtatctgccacagaggaggccctctaaattttttgtggaattacttaatgaaatgaatgagtgattattcgccttcacaggattgtgtgagaccatataaggtgtgtagagcggtttgacctcccaccattgaaatgctccttaccattagcatctaaagtgattcacttgagaaatgtgtgtgctctcgtgacagtctgcttgttccagccttgctggaatctagatccacgagaatcctgtgttcatttttctctaaagaataattacgaccatctaaggtaatagctaaagaatcgagacctgtaagaactcttagccaggtacagtggcctgtgcctgtagtcccagctactcaggaggctaaggtgggaggattgcttgaacccaggagtttgaggctgcagtgccctatgattgtgtctgtgaatagccactgcattacagcctgggcaacatagggagaccttgcctctggaaaaacaaacaactcttggtagtctcctaataacctattcaaagagttcagaatttggcgggtgggtggggggaggggggtccatttatctctgttcctcttcatatctttgccagagaagataattttaaaaaagaaaatattgttgtcatttgcttttctacgaaagaagcacatttagatagtgaaggaaaagtgaaaaatgttctttatgccgtttacattgtctcatttaattatcccagtagcactgcaaggttggaatagtgactagcctattttatagataaggaaaccagagctcttaaatattgcgttgtttgtactctagaatatacacttaagggccgggtacattggctcacgcctataatccaagcactttgggaggctgaggcgggcggatcacctgaggtcaggagtttaagaccagtctggccaacatggcgaaaccccatctttattaaaaataaaaaagttagctgggtatgttggtgcacacctgtagtcctagctactcgggaggctgaggcacgagaatcgcttgaacccaggaggcagaggttgcagtgagccaagacggcaccactgcgctccagcctgggcaataaaatgagactgtctcaaaaagaatatagactccaagagggttgcagtttcactggttctgcctggttcacccttgtgtcttcagtataaaccatggtgccctggcacgtggatatactggttggttttacttttgcctaagataacatcgctagttaatggaatctactgagatttgcatgtagtttttatgctttccacagcctatgagctcttttcactgcagtacttttaagttttctaagaccggggtccccaagccctgggccatggatggtacctgtctgtggcatgttaggaaccaggccacacagcaggaggtgagtggcaggcaaacgagcattaccacctgagctctgcctcctgtcagatcagcagtggcattagactctcataggagcacgaaccctattgtgaactgcgcatgtgaaggatctaggttgcgtactccttataagaatctaatgcctgataatctgaggtggaacaatttcatcccaaagccctgccaccgcatcacatccatgggacaaattgtcttccacaaaacctgtccttggtgccaaaaaggttggggaccactgttgtgagatcatttcgagttacacctctctgaaaaagtggacatattccagtggtgtttacctggcagctgttgtaatgctatgatgtaggtcttttctctatacagaacatgctgatgctgatgactgtattctttggcagctcatagtatgagcatataataaatcttatgtatgcactttttaccctcacttttcaaattgttatatttagtcagtgaaagcaactagaaaaaagtaaaactgataccagctgttatacatattgccatatcccagcatgatttgctcctgtaagcctggtggtcacatacagcagtctgcctttcctgctctcctactcatcttataaaaagactctaccagattagccctcttttcttttattctgattcctgctattttgaagttgtgggaaccagagaaggagttcatatttctctaccattctatggcacctttgccctagtaggatggagtagtactgagctgacatgtcagtggtatgctggtgatagcttctatcacatgcgagaactgacagttaaattttcagacattctatgagcggttgttaaacatagtcattgttaaatgttaaaatatacaagcttacaagttaaattatatttaataactgataatatatactcatcacttcctgttatttcaagtgttgctatatatctatgcttttaaagtttctatcatgtctgtgtgatggaaatactgtgctgctgtgtatctttttcttttactttttttttttttttgagatggagtctctgccactcaggctggagtgcagtggcgcgatctcggctcactgcaacctccgcttcccgggttcaagtgattctcctgtctcagcctcccgagtagctgggactacaggcggcgccaccactcccggctaatttttgttatttttgctagagacggggtttcaccatgttggccaggctgatcttgaactcctgacctcagatgatctgcctgcctcggcctcccaaagtgctgggattacaggcgcgagccactgtgcccagcttggctcactgttgtaagagctaagctagattgctcaagtgtttttccctctcctaccttgacataaaagttttgtctgtgtcagacattcgtattttcagccacaccccagagtgcatcactgatgtttgaggttcttcaccagcaagcccacgtcagcactcggtcatgtctgtccaaaaggtgctttgaacccttggaggatgtggaatgccatgtcgacctcagtgccaccaggggcatactcgagcccaccaaaggagcaagtgaaggggttgcctgagcggcgctccggaatgtgctgcagccttctgcagaatgatctttgctgagtgaggcctgcctgtaggagctaactggtatgtttggtagtggaggcatcggacagtgtagtcagtaacaagatactaagataaatgcaggggttaaatgcttcctagagtgatgttttttaagctggctagttttgtttattgcaggaattaggtaactttgttggagagcaaccttgaagagcagtggagatgagtcagacttcctggctacttagccagtatcaagtaattaaaaaccactccatggatggggccacgccggcagagaaaccttcttacagggaatgactttatgatacccacacttttcaaagagtgggctgcattgagctggtctcattgggaagcatgttacctacgagtgagtgagaaaagctgcacaggtgcctagcagttgctctgctcatttcacttccactggatgagttactttgttccccattccaaaagctgactgttcctattcccatttaaacggcactttataaaattctcatgtgtctttacattttatgcttgccacaaagaaggaaattcattgcttgattaaacttaaaataggattttttaaactaagggaacctaaaagccactcttgactccaacatatcaatttaagccactgcagctgcggtttctgtcccgtcctctgctgttttacacagaactggcttctagtggagctcctaacattccaatctattttttttgtttgtttaaatttcgttatctatgttatttaaaaggtatattaaaaatataagcaaagttgttttcttcctcccctctagcttttattgaaaatataaatgtaagcccagaggggaaaattatttcctaattctgtaaagattcctgcaacattttccttccaaggaactggcagtatctcctctgttactctcagttgaatatagaatatttgggattgtggacaggtcatatgtttgtttctctccttcccccgtgttccgctttgcccaagtcaacaagccatggttgccaggaggctcttcttgggccaaagcagataccaggacttcaccttgctgtgacagtggttggggaccaggaagatgagcaagaatgaatttgtaagcaactgaatttgcaagcaatgtattgattgtaaatgaattatttcgtacatccctgtagttgtccccagtctccattccaataggatccctggagctgattgggagagaagaaaaagagatacctgattggtacccctcctagctgttccagtagccaggtgggcttggcagagactatgaaagaggcaagctacaagtggattgagactgtggggaatcttacaaagaaatagggttgtatattgtttcgactccttttgcgtggttgtcttctccaagctgcctagataagtcagcagaagggctcagatgaaacatgttttgtaaatgtaactttcaggtaatgaaacagtaccttcccattattgagctctttttttaaatagctagttttgagttgaaaccaagacaatagatattcattatgcaaacctttgagccacctttatggtattactgtcttagtattgctctaatgttaaatgtcttctctgtttactgtaagataaaacctttgtgttcagtcagaaaataaagggactccttggaggactttgccaggggctgcatgaagatatgtggctgagacctatatacaaaggccttctgtgcagggtctatgtggctctacaaaagtggtaagctgagctgagaggagaagcctacagaaatggaaagtggaggttcctgtgtccattatttcaaactgaagttgctcctttatttagaaaacaaagcaacatgccagacaagtacataaacatttcatgtaattatattaagataggcttggaaagtgctgatggagactttaaaaacacctggttcaaaagcatgtatttatcttctctgaaattaactggtgttttatgtcatttacagtctagtgtgcacacttcttatttagcaaaaaataccacttcattttcattttttccttgttgtagatgtggcacatattactactggaaacttcgatgcccagtatttttttctctattctttttattaaagaatggggtatctttttaaaactctctttgcacactggcatgaacagggaacacagtattggtggagatggggttgggggaggtttagagggaggaattgcattcttttggcattcctgagaggaaaacagctgtattaacttttttttttttttttttggaaagtgcagaggcatctcccctgactctcagaattccagttctttacagctgagcaaaaacagcatggcatattatttatgcctggagtcagcatgcatgaatgttgctgttctgattattagccaagagaaaacagctgtatacattactaataaaaggactttgaaatgaaaaaaaaaaaaatccaatagtggggttttcccctataaacagcagatgtgtacagggttttaccccatgtctgccctgtactttagcaccactgtcctgggaggtaaatggaagccagcatgagaggtggaagtatggtgaaagtagatatgtttgtagcaaaataggtatgctgtggttgactagagacattttaaggtttattattttaagagagcagttgtgcctagccatcattccattcctcctccttcgcctctcataaaaagaaaatattgtgtacctgcaaacatatgctctgctatcagcattcagacacccaaacaccgaaatcatttagcagctcttactgctgtcagtaagcagatgatggcgtaaggggtttagaatttgatatgtgttttctaaagcatctctcaaaataggcattgtctatttcttgtttgttgcttgtgggaaatttttcgtcaagtgtacctgtacctaacccatgactaaaacttacctagatcttaatttctagatttaaaaagaagaaaaaagggatcaagtaaggaacagcgaagtaaagaatatctaagattaaaagtaggaatagctacaattacctagatttcaatttctgggttatttttagtgtgacaaagtaaagagtgtccaaaattacaaatctgagggataattcaaagatccttttttgttgtcattgttcctgggggaatatgtttcctgggggaaggagcatatctgactggtcccagggaagaaatgaagtagaactggtattgaagagatatctttctatgggaatccagcaaaaatactgggttccaagaacttgcttgcctggggaactcccagattctttaaaaaccttacatgtgaaatagcttaacataaatatataggtttagacatactgattgatgtttcagtgcctatttttatatgcatttatatcgctcaggtcatctattttccacttgttctattaagtcatggttttgcaaatggtcaccatttaaatataagggacctattttgcttctttcatattcttcgacatttcctcaatgaaagaataaggaaagtttaggagtgagttacttagggtgtattctactctgaggatttcagttttactatagctgtatttaatcttatattaattgggcacttatattaatttagtgcctgtataatgttggcactgaaatggttctttagtgtgttgtgagaaaatttcaatgaagtcatttatagaaaactgtttttctcaagggaatttccctttccccttttcagaagtcagaggaaaaaaaaactggaattagagtatagagttagagataaagcgaaacgatggcagaatatgctgagacatttgctcaggggttaaaagacagggagtttatagaactcccttttctgcttgtcataaggttatctgttccttcttttggacatctctctagaggtgttcccaagctttgtatcacagattcttttatcgtgggggtcctaaactttaaccatttaaaaataaaaaccaagggttaccaaacaccttaatagagacttctctatgaagttacaagaagtaaacaaccatatggaagaatttgatgtgttctttgaagtcactgcttgtaagagaagacaacgtgtaatttttgagttactgtatgactcacgttggaaatgtttaaagccttctgtaggcatggtgtggtggctcacacctgtaataccagcactttgggaggccgaggcgggaggatcacttgcacttaggagtttgagaccagcctgggcaacataatgagactttgtctctacaaaaaaaaaaaaaaattaaaaaaattaaaaataaaaaaaattagccaggcatagtggtgcatacctgtagtcccagctactcaggaggctgaggtgggaggatctcttgagcctgggatgtcaaggctgtttgagttgtgattgtggcactgtgttcctgcttgggcaacagagcaagaccctgtctgggggaggggtggggcgcggggtgggaagcctcccgatgtcctaggaatagaaggcttttgctgttgcaggagtactgaaatggaatagtaggagctgccagtgaaactcattcagtgttgatgtagcatgttttaagaatgtgttatttacggggaaaactctcgagttcgtcagcgaactgagaatccattcatgggtgcagaaaaagatgcccattgcgggaaatgtgtctgtactctgtggcacctccttaggtgggaggaatgtggtgggggctgtgaagactgtgccactttcacacctctgcatgcagaatgactctcattctcttttaccaaagagcgaattcattattgaacctgttaggatccaaggcattcaagcatatttggggaagactactcttgttctctagagagacaggtctaaatgattaagtttccaaatactgagcttattccagaaataatttggtttctgcatgctttgttttctacagcatggtgagactgccacttagttagactgagtcttgtgaattgaagcctgtttacaagaagtctgacatacacactattatttttagcctgaacaacatgaaaaccatctatttaaaactcccaaatctgaatgacagtctcatcttgcttaaaattccttctagtactttttaagccaacagaaaggaacatataaacaatttgttaattgcaacagctggtccctgagtatctttatgttaatgtttggaatctttgaatttgaaagacttttagaaagagcatctggattaatgtagtgctattcagacttcagtcttgagaagtggaatcgacctcatcaagacaaacaaacaggggccttatacagattgggagggcgacagcaaaggcatggtgaaatttctttaaaaatcttagtagagaatgaagacaaatggtctcggtttggttgtgggtgaatagcctcttatttaatttagtatgatgtttatctagctgctgtggtaaatgaggtgaaatcttttgtgtatacagttaattcccaattattcatacatgctttagccaaattgctgattctctgtggactttggagaccttccccccgccacccccccccccccaatacaatttgctgtccatccggtcccatgtcctagtttcctctctggccatgctttctcacaggggttcccagttgctctcctcatttccatctttgctccctgaccaggcccctgctgcttttgctttctcgctgcttttgctttctctgctgcattccctggatttgtctgacagtccagggttcttgtctccttgccgttgtctctctcagtcatctcagagtggtaatagagaagctagttgatggccagggaaaagctacagagagctaatgtctgctgctccttgcttctcttcctgtcacctttgggcctttgttgaatgaacaagtggagagtaagtagagaaaggggtttcctgaaacatttccagcctgttcttttaagtgctttttttcctcaggattttatagtcctatacgtggtaggtaggcggatgggcgggtggtgggggaggtattacagcaaaatgcttacatattcttttcacctcttgttttcttttttgttctcaactgggacctactattctcctccccattgctgaaaggcaaattcttagaaaggggccatttagagtatgtgtagctgaagaacctcaaatagttcttcatttagcaaatatttaatttcttgagttctttttatgttttgaatattcttagagatacgaaaatgaatttgatgtagattctgcccttaaaggggtttaagtaaaatctagaagcagaatttacacagacaaccacacagaaaaccctaaatctaaagccgatatgtaaacacatgattaccatagtaagtgagaaccttgtaccgcgttggagaagtgtgaagggtctccccagaagacattgtttttcctggggaggggatcacagtagtacagatgtgaaaaatctgccctaatattttttgtttgcactatgtggatggaaatgaaaacttacctgtaacaaacagttttatctatagaatgttttataagcctatttttgttccttttctattatatgtctacacagaatataaatttaccccatcaggtgaaagctcagcataggtgtgcaagccccacttggctaaaatattggttagagcaataaaatcctgtgttccattcccaaaccagttccaagccaggtaatgggttgaaaaggcctttgattagttggatttcctataaaccaactctgaagtacgcatgcattgattgaattaatagaagagcccttcattcccttgccagagcctggtgttgcttaatcttttagtagttccactaaagcttttggtttctaagcccaaatgagattacaaccagcaaattttaaagaagtggagctaagagagacgagtatagtaataacaagtctgaaaaactgcaagaggacacaagaattctgagtgagcctggtagtttctagtgagatttccatttaaagttttgatagttaaccttccatggactatctcagatcattctttggattcataaagtatttttgttagtttccttgccatagccaaataaaaataatctctgaattgagttaggaaatttagttcctgctacaactgcagatttcatgtacaggaagaggaaggggtgggcaattacagaggattagggaacatccctttagagttcttcctgggatgacaatggtcgaatgagataatgtgagagtgctttgcagttggaaagtgctgtaggaaccctgaattcatctgaaactgtagcttagtgtttaaatgatgtctgttattacttttttgaatagtctggagtgcttgttaaagaaaaaattattctgtgatatttgttgaatgaagcacagtgaggaagactttactcagggcccttgtaatagctatagggaccactgcaatagggtcttgcagtgggggagagagaataggctcaattctgaatacatcatcatgggcaagtgggaatttatagccaaggagcagtgtggggatcagtggatggaaaattactaagacaaaacctaaggggtaagggggcttctgactcaattgccctaataagattcttggtgaagacaggccagggtgttgagacattacctggggagatggtggaggatgaggaacttgatcagatattggagatgatcagaaattgaggatggagggttctgaaactgacttaacaggattctttgctaaaaccagattctacaaggaaatacacatatgggcctagcggaagatacagaaccctaactgaagtttggctgaccaaaaagaatctttgttactgttaagtattcggattcctgggcctaatgccaggtctactgaatcaagatctctgaagacaaagatgtcagaatctacattttaacagactccttgggcacttcttttacccattacgttagagctgcttagatagaagttgcaacttttttggagtctgagtttgtagttgtaaaactttgctttttgatagaaggtgagtatgaatgtggtagctcaatcagagtgggccacattgtaactaagtgaagggattctcaaacatctgtcttggagatagagatggaaagattcatgtcttgaaagcttatactgtattatatttaatttccttatatgataaaatttaccaaatagctctgaggaaggaatcatttttaccaccatctttttttttttttttttttttgcacaggggcaaattgaagcttagaaaggaactttttcttttcttttataaaattttactttaagttccaggatacatgtgcagaacgtgcaggtttattacataggtaaatgtgtactatggtggtttgctgcaccttaacccatcgcctaggtattaagccctgcatgcattagttatttgtcctgatgctctccctcccctcacccctgtccctgacaggccccagtgtgtgttgttcccctccctgtgtccttgtgttctcattgttcaactcccacttatgagtgagaacatgcagtgttcggttgtctgttcctctgttagtttgctgaggatgatgcttccagcttcatccatgtccctgcagaggacgtgatctcatttctttttgtggctgcatagtattccatggtgtctgtgtaccacatttagaaaggaactttcttaggaccatacaactggttgtggaaggagcagaaattgaacactggcctgtctgggtctgaagcccaagctctcagcctccatgcactctgaattgcctagtgctgatggccacagtcatcagggaatagaggttaagggaggagaggcaggcagaggctaaagtgtcactccagctgtgggctaaaggatgctgacctgtggacattagcccaaaccccagcaaacccattaggcatgatacactactatgtaaatttaaggcctaggagacatttgtagcaagctggttgctgtcaccgagagctcatatattgactttgtcaagcaagagtgagaagagaagatcacatgttttacttaacattgcctgtaaacttttcacaagacttttcaaatcaatacttatgctttttctttccatattgtaagacactcagactggtaagtgaagggactttaaagcttggcattggtttagggctgtagctatgggggtagcaggaaaagatgggaggagggaaaagcgaaagagctggacacatgtggacactcagccggggcatccctgggaccccacattcttgagattttattatgtcttgagaccaaatatatgtggagggagtgatggtaaaggtgataaaagtgcaagttataatagaatttcatagatagggaaaattgaaagaaggataatatagtttatgggtaaaaagcctgtgccacattctgagagcttcagggtctttttcttccacactacccccttcagcgcctccacatacccagggggtaagctctagtatttttgattttcatatttctgccttgtgattaaatatgaataccatattgactagaaaattggtttgtctttaaattatggttttgaaaaggtttactctcttttgctattccatagaggttagtaggccatagggcccctttatcttatttatttatttatttgttcatttatttagggacagagtcttgctttattgcccaggctggagtgcggtggtgcaatcttagcccactgcaaagtccgcctcccaggttcaagcgattctcctgcctcagcctcccgaatagctgggattacaggcacgcgccaccatgcctggctaatgtttgtatttttagtagagacgggttttcaccatgttggccaggctggtctcgaactcctgacctcaggtgatctgcccgccttggcctcccaaagtgctgagattacaggtttgagctgccgtgcctggccgggcctgtttataactattatgctcaaggtaaatgtagaatgtagaaattaaggtgaataaaacattcatattaaaagcaaaacattaattttgtatgttcaggatatatggtatgagctgggacacctgggctttgagccacaacttcactgtctacaacacacacaaacttcctccctcccccactgtatcccctcccccaccacctccgacctccaccccaactgtaaaagttgaagctgagcatggtggctcccggctgtaattccaatacttcgataagttaaggtgggaggaccacttgagcccaggagtttgatgttagcctgggcaacatggcaagactccgtctctacaaaaaatacaaaaagttagctgggcatggtggcgactgcctgtagactgagctacttgggatgctgaggtaggaggatcatttgagcccagatgacatcactgcactccagcccaggcaacagagtgaggccctgtctccaaaaaaaaaaaaaaaaaaaaaaaaaaagagtgtaaacaggtaattttactgggccttagtttcgtttcttcatctctctgatgaggggtgtggctgaatgacctctttggggtttttacatttcacagttgtcaatcataattttctgtgaccctgaccaagcctcactctgacctaatgactcatacaaacatttctcttcttctcttcatgtttgcgtattttgattgcacatgtaccttggacttagtggggtcactggcaaagcaagtgtattttctgaaatacaccagagaagtgggtgtgcacagtgttttcccttgggtcgagccatgcttctgctgtccttccagctggaatctgtcagatgtggactgtggatctcctgagtgcttagtaaaaatgcagaatcctgggccccttgcagacctgttgagggggagtctctggaagtaaggctctgggctctgcattttaataagcccctaagtgatccccaggctcactactgtttgagaacatgaatgattctcctctaagtatgcactgtggtctttagatagaacccatggttccctcaaggcaggggtcatgctgtgtgtgtgtttataaatgaaacttctcaggataaattgtgatcatctagtttattcactcatgaaacaaatacttgcatccttcttttatacaaagtcctgtgttagttgtgggaatggagagaagagaatgtatctaaggaggcagagcagacagattttggcaactgattagatatgagggatgtgggagaggtcaaagttagctagcgggtttgatccggagtgtggaactctagttgtgccagtacagaaatgggcagacagtcattggaacagttttgagaagaaagatgcccatataggaaagagcccatagaatggttataaaatatgcctggatttgtggaaccagttctaaagctggcattactttcagattcttagtatcttagaggtgggtgtgatcttgtagatcctgtttcagtctcctcagaagcgggaaaaattggtatcatttggaggctattgtttaggttggggcaaaaaaatataatggggggagacattatatataaaggtgatatttacttcttagacttgagagaagctggctttcttaataatctctaactgattttgaacctctattagaataagccctggaaataatattggaaatgatataggcattctaagtagatatattctaagatgacagcctggtgtggtggctcatgcctgtaatccctgtactttgggaggccgaggcaggtggatggatctcttgagcccagcagttcgagaccagcctggataccacgatgaaaccctgtctctaccaaaaatacaaaaattggctgggtgtggtggcgtgtggtcccagctactcaggaggctgaggtgggaggatcactggaacctgggaagtcaagggtgcagtgagctatgattacaccactgtactccagagctgggtgccagagtgagactctgtctccaaaaaaaaaaaaaaaaaaacaaaaaaaaacacctttagaatttactgtcttgtggtcaagtagaatgttggcccgtcttcttcaaagacagcctttctctcctgatttcccttaaactaaggaggagggaagtaattaagattttcagtgggaagccaggcgtggtggctcatgcctgtaatcccggcactttgggaagcctaggtgggcatatcacgaggtcacaagattgagacctgcctgaccaacatggtgaaaccccatctctactaaaaatacaaaaattagctaggtgtggtggcacacacctgtagtgccagctacttgggaggctgaggctggagaattgcttgaacccaggaagcagaggttgcagtgagccgagatcacgccactgcactccagcctggtgacagagcaagactccatctcaaaaaaaaaaaaaaaaaaaaaaaagattttcagtgggagcacagactgctgctcactcactgagtggatttcattatgtagtctcagtgtttcccagactgcttgacaaatgaaggatgtacgttattgctttttccttactttggcctgagaatgatgcaaagcaggcctgttgcattaccaagcatcttgggatgctgcactgagtaataggcttttagtatgtgttaccttgtcaacagcagtgactgctatgcccaggacatcagcattgagttgtttttgcacttgtgggggtgacttcctattgtcctaccagaatcagcaaggtaagttgggagaaatcctttgtcagcaggatgagaagcagcaagtgaaggctgggctcagtggaggagaacaattctaggagctggcgtggtcacaggaaggatagagaacacggaggtcaggaggaagcatgagtcaggctggtggctgtccggggtcttctcacattagcagctggagagccagggctgaaggttgagtcgtaagtggccagccttgtgaatgtggtatgctagacaccaacagaacttcctggagctgggagtttcctggggtcttcctgatgtgtaagaactgatgatcaggaccttacaggttatgtgtctattttggttgtccgctctgacagggcagtggtgttgtggtagatacacttttgctggaggcatttgctaggtgagtgggcaagatgtgatttgtattgggtgtaatactcaatccagcagtgcttctctgctgcagtcaagtccagactgcaagaacctgttaaacgcagggaattccaacatagaatcttaagaagtttctctactttgaatgtatcctccatgtttttcgtgtcgacagaagtaaaagtgcagtgatacatgagtaaattttcagctctcttatcataggatttgtttaatttggtaccaggatgtaatgaacttgaggtgtgtgaatgagaaatggagatgaagtgttttattagtttagaaaagggagtaaaaggaactctgagtgtaggcacgaagctttcagctctgaaacttcacctttttgccacactagcagcagagaaattacggaaagctgattgtgttgtctatttggcaagtcaaagcaagatacagcaagctaaaagatgagtcttctagattgctttcaccttctgtgacatgaaatttctaaaaataagaaataaggagcccctgggcagttgctctttagaatttgtgtggacagatccaggtcatccttgttcttctttgtgttttttatgaagtgagactttctgattagtgagccagaaatttaatctgacagcttttaagtttgatgatttaaaaacacaattggttataaaaattttaaatttataatttccagtaaagtaggaaatgaaaattacccttttgctcccaatttcacttccagaggtttatatttaccatgtactaaaacctatcatttctcatctactttataaatgtatgaaaaactctgattttatacctcttttgctgtgtgtcattaacatgatttgcttaacttaattttatgtccagtatggctcttgagagagggaactgtgtcagaatgtgtgtatcattttaacccatttctggttgttgttggaaacacagttaagttgcttactggtcttactgctggtttgctttataagaaaattcaatccgttttgtcttcaggtaacactacatttctttcagtcttctgagacatttcatggtttcacttatccaggtgttgctaatcttacatagcagtttatatgccttgtctattcttcttaactaagataacctgttgaagtattattaaattcaactatattataaaattattaaactgtaggcgggatgtgttttcttcctttctcacgtagcttcccttccactctggaaatggaaggtttgacatcccatcatttgataggtctgatgactttccagtattttaagcagtaatattgagactagggcttcttgttcctcctatccttaagttttggcataatgatttgcattaatattactagctaacttttattcatttttactctatgccaggtacatggctagatgtgtaacctcctcctgatccccagaattactttaggaggtgtaggtgctgttattaaaaatacaaaggaagaaatggaggcataagtgaataaagataagtaatttataaagtaaatacaagtaaaaaatgaatattaagtaatttgcctgcagctattaagagctatgaagtgatggggtggaaatttgtccagaggcccccattcccctcaaagcccttttaatctctgcgctctgctgcttcttgtacccttttactcttgttcttttactcagctcatattaatgagcactcaccatgccaggcttggttctgggtgctgagaagacagcagcaaacagaactgacaatgaagaaagagttaaacaaataaacatataccagaggaggtgatggcgatcaagaaaatactaggtaagagagagggagggtatgctttctggcaaaacttataaaaatatgagaaactattctagtcattggttctatttaaacagcctaggacagtatgaagaaaaggcaagagttgagcggaaaaaataaatcagtcctaaaaacagacaaaaaccccctcaaatccaggacctatcaagtttcatatcttcattgaaatggtgacaaatggtgtatcagtgtgaaaaccagaaaggctaattgtttgtatacctcacagggcagtgtgtgatcatccaggagggacatgtgaaggaggttaagatttaaatgttggaaacaccaacattctaattattcctgagtttcaacaccagtcattcaagtaacagttgtaaggaattttcttttggaattttccttttcctttaggttctcccctttctttcaggatggtggggagcaagaatccctaggaatattgtaaaaatatttcaccaagaactgctaattagcagaggtcttttcttgtatcccttttgataattcccacaaatgaacttaagattcagaagcaaaggaaaagaaaaaaagactcaaaatacaaacattaagaaggaatattctgaccactttggaagtcaccgtcttaagtgctgaaaaattatccattaaaaatattttttcaagagggtagatgaaagccattgctatttgccatttagaaattgtgttttcctcagagactgttgtcatgaacattggtctattaataacactgaacaatctccactccatcatccatttggtttggttctggcaagtttataactcctttcacatgacatatagatttttcatttataaaaagttggaaaaaggatttcccatttcttccagctaggtagacttaaaaaacatcgtgacccctttctggcccctcatcttcttcccactgtacccatttattggcctgatagcctgaagattgattagagagaagcgatccagatagacttggaaaacacctaatcctgtgcatggccgcacctctgaaaaattgcatgcactataaaccagagcatttcagctttttaaaacatgcattgttacactggggaagatagagacattgagttcttctacagaatgtatctaccgtattttcaagtttttaagattgagatagttcttttgcagaggtctatttcctattgagatttgaaaaggaatgttttgattttaaaaacttaaaagcaaaacttaattccttgctgtttgcaatatgtcatgataccttgtgtctttatttagcgtacgtttatcataggaaaatttactgttgccagaaaacaggccaatggaatctgtgaattttgtattggtgatttagtagattacaaagaaaaataatttgacgtatttgcggtgctttttaattatgaggaaattatactgcattactttaatgtagacttttcactttctttgccactctcaaattcagtccagtaagtgtattgaattttcaccaaatggctagctctgggagctgtcactgatttaggggaccacactttctattttgcttgtggactaagatgtagaaaccagataataaaaaggagcgttaatataattggcaaaaagatggttatagatcttacaagtgtctcaagtgagagaggttagaagaggaagagagaagtgaaagctgaagtaaggatttcaaaagttgggaagcttcacgaatttttatgaattaagcattcttagaaatccttacatcactcccttcttccatcagtagaacaaaagcctttttctcttatgatgctctgcctactatagtttctttactatatggaaactggaaaaataagtaattgggtttatcactgttgatgtctaaataaaatttgggattacaagtgcttttctcctcaccctcataacattttataagaaaagaactcccaatttggggtttgagcatgttcctctaaaagcatcggaaatacttgctttattagttcagttaaaaatttaaagatttatggtaggacacatccataggtgacttcatagaagaccaccatgggactcagtgagtacccctccagtctgggaaaagcttgacaaactacataaacctgagctgagggagaaaatacacatgccatttccccaaattcctggtttctagtgtcttggcactatggtatttttactcttattttataaatcctataccagcattttaaaaaatgaagaaaatggcaagaaaatcatggaaaatttgagtcctcatttagtacctccctatcttgattttttgtcttttaacagatgaagtggtgaagagagcctgcgattgaagattttttcatctcagctttttcccccttaccttgttctctctcatgtttcatgatctgtgtcatagatatttcttcattacgagcacttcgcggtgtggcttttcaatgtctgaagtggattaagtggcccacagtcagttctgtgacttgagtttcaaaagtaaaattaccatcaacaatgtgattcaattttattttctatactagctaaaagcaaggaactatattattaacaatcttggctttactgtagtttaaggcaggtgatgatgatgcttattagtccacctgaaagagtccttccaggtttttggaagctttattcctgcttattaccttgcccttgagaagtccttcatggaaagtggaaacactgggttgacttcttttccccatatcctagttgaaagggacagcttatatgtatgttagactgtccaaaagtgtttgtagaacctcattttaaaaaatcaactgtattgtactttttaaaaaatgggatcttaaactctttattaaaaataataaatggaaatgtgttaagcaaaaacattacttgacctcttcttattcattgtgtaataataacgtataaaataattgctttatttacatctgtattgaccatggctgaacttcttgccagtaggggtgtcgtgagtcctgttcatctctctgccccttggtgggatgcctagcacttggccacttggtaaatactggaggaatgattgaatgtgtgaatcctggattagttctcaggaatattataatagaaacaacaatgatatttagtaaaaattgaagacataattatccagttacttctacaacttttaaaccaacttcaatgaagtgtagcccaaaaacatattgcagatgtgtttgggtaacttctttctttgtattgttttttccccctcttttggagactggattctcactttgttgcgcaggctagagtgtggtggtgccatctcagcttaggtgttcctcccatctcattgtcctgaatagctggtgtatgccactacactcagctgatttttgtaattttgtagagagcggatttcgccatgttgcctagtctcgtctcaaatggctgggctcaagcagtttgcccaccttggccccccaaagtcctgggattacagatataagccgcggcccagcctgtattattattaattataattcaaccctaggaatatacattgagttataatttaaattccatttttatatttaagcagttttttttttttttttgagacggagttctgttcttgttgcccaggctggagtgcaatggcgcgatctcggctcactgcaacctccgcctcccaggttcaagcgattctcctgcctcagcctccctagtagctgggattacaggcatgtgccaccacgcccggctaattttgtatttttagtagagacagggtttctccatgttggtcaggctggtctcaaactcccgacctcaggtgatccacctgcctcggcctcccaaagtgctgggattacaggcataagccactgtgcctggcctttaagcaaagttttataggcattactgtttccccttgctatgtttagagtggtggaactgaagtttccccttgctatgtttagagtggtggaactgaagttggttttttgtttctttgtttgtttgtttgagatggagtcttgctctgtcgccaggctggagtgtagcgacgcgatcttggctcactgcaacctctgacttctgggttcaagcaattctcctgcctcagcctccagagtagctgggacttcaggcgggtgccaccacgcccggctaattttttgtatttttggtagagatggggtttcaccatgttggccaggaaggtcttggtttcttgacctcgtgatccgcccgcctcagcctcccaaagtgctgggaatacaggtgtgagccacggctcccggcccgaaactgaagttgtttaattgagaagtttcagggctgtgaaatgtacactgagcacacaccctgcacatttcatcttcccgcctttgttttggattctatatcttcagtgcccttaaagtgtgaaactctcaatcagaccccgcttcctgcactgctccccaggtatcttacattccttgcaacattttagactgcatgtactattttgtactcaattacataattttattttgttcactattgttttatccttgcttgggtgttttcctcactatgggaagaagaaccctaagaatgaatcatctcactgggaaaggaagcatttaaaacttatttaatgtatttttataattggggaactgtaagtatttcttttagcattaatgcttgtttccaagaaatggtgaacttacctaaacttagtaaatttttgtcataataatagaatattcacaattgtttttaatttataaaaatgtaagttgctttctactagggtgttattttaggggggaagatttgtaaaaatgttcagtcaaaatattgtcatgttaatcgtatttttcaagatgtgctaaaaatgatttcccacttagaacaaattagctggaggccaccttatcccacctccagccccctctgcaacacccttcatagctaattacctgcttttcattccaaattttctatgacaaggtgttcctacctcaacaggtgatcaccatggcaacgaggtagtctgttctatttttggagtatgaaagtagtgccttcttaaatctaataataaatgagagttccagaaaaccagtgcttcaaacaaatttgatttacttgaatttttttttattttaaatcacactttgggaggctgaggcagaaggatcacttgagcccaggagtttgacaccagcctgggcaacatggtgacactctgtctatacaagaaatataaaaattagccaggcatggtggcacacgcctttggtcccagctgctcaaaaggattgcctgagcctgggaggttgaggctgcagtgagctatgattgtgccactgcacaacagcctgggtgacagagtgagaccttgtctaaaaaaaaaaaaaaaaaaaaaaaaaaaaaaaaatcatgtcattcagtcatgtttttattattttttcagactgaggagatagggaaccagtttaattgtgatcttttattattttcaaaaaccagcaactaccatttactagtggcttattgtgtcttggcagtatgctgtttttattcctattgtgcagatgaggaaactgatacgtcaagtcttgatcaagttcacagaactagcaagagcaggaattggaattctaacccaggcggcctgctttcagatcctccactctaatccatttctctgtcttgctggagccttgctagaatgcttcctctcttgggagttcagccgactgggagtgcctgaccctttataaaggtgcttaatatgatgggcagccctacgcaaataggggtgaatggaatgaagggggatgagcatgatgctatgggaatggtagcaagtcagaaacaccttggaattcagatagcagcgtgtcctgtcactgatgtttaaaattatatagtttgaaatataatgtttttaataaagttggttgcagatgactcaacagctatgggagttatcagaaggtgatgtagaaatgcttttagtgttcttccaaatgctaggaatcggattgcagcatctatttcactcagcatttgggtcatgagactctcctttcattctgtagtcaattttcaaattttgcccttgtaaatattaaaaggctcaagtggataaactaattaaaccataatggttcagtttattttattgtgacgccttctagggaggggtttatgattaaatattcaaaaatttgccttggtttgataaccattgtgtctttttttgttttgttttgttttgtttttttgagatggagttttgctcttattgcccaggctggagtgcaatggcacgatcttggctcaccgcaacctccacctcctgggttcaagcgattctcctgcctcagcctcccaagtagctgggattacaggcatgtaccaccatgcccggctaatttttttattgttagtagagacggggtctcttcattttggtcaggctggtctcgaattcctgacctcaggtgatccgcctgccttggcctgccaaagtgctgggattacaggcgtgagccaccatgcccagccccattgtgtcttttgtttaatgatgaaatattgaagaaagaacttgaaattatctttatattttaatcttatttcacatctaaaatcatataattatataaatagatgagactgtagaatataaccaaccctccttatgttccagacgaagagactaaggctcagagaagccatgtaatttgcccaaggttgcacagcacacagctattgatgaatggagcctgggttctttagcctcatcacactgagtttttgtgcacgtgctcatgatttttaatttggttgatgttaacatgttggcatatattgaaagaagtgggagtgtccttgaagaacttaacatgtattaaacatttgcttcgtgctgggcaaattttactctttaaagtaccatcagaactgatagtattgtcactgataccatcattattgtcctcctcatcatcattccccattctagagacaggagggcctgaatttctcagaggttaagcagattctttgagtgggggatctaggtttcaaattcattgttgttgtttttaagagatgaggtctcactctgtcacccaggctggagtgcagtggtgtgatgatggctcactgcagcctcaacctcctgggctcaaacaatcctcctgctttagcctcctgaatagctgggactacaggtgcatgccaccatgcctggctaatttttaaattttttgtagagatggggtctcactgtgttccctgggatggtcttgaacttctgggctcaagtgatcctcccatagtgctgagattacatgcgtgagccaccgtgcctggcctcaaattcttgtgtcaggcactgtgtattttgcagcagggaaaatgaggttttgactcttctgccaactctcaatcaattgactgtagctgattggagcgctgtgtagaggatatagaagtagcctctgggcttagtgggacaaatgcagtgtctggtggtgtatgccatggccctgaagtgtggtcggggtggtacatgtatgtggtacatatgttaccagacctataatttctcttaacatagcaatctgattcttagtttcagaggataggaaactcaattttaagtttacctgggaaggtggaggaaggcttggttggatcaggctttggaaagccaactcttgttaaccaaatacacagaagactgttttttttgtgtgtgttttttgttttttttttttttgagagggagtcttgctctgtcccccaggctggagtgcagtggcgtgatcttggctcactgcaacctccgcctccctggtacaagcgattctcctgcctcagcctcctgagtagctgggaccacaggcatgtgccaccacccctggctaattattattattattattttgtgtttttagtagagacagggtttcaccgtgttagccaggatggtcttgctctcctgaccttgtgatccgcccgcctcggcctcccaaagtgctaggattacaggtgtgagccaccgcgcctggctggtatggtctttaattgtaagaaaattgaagagggaggcaagtaaacaaagattttacagtaataactctaatctgagtgaatagagaagttcttgattatagcagaggccaggaactgttttataagtactaatactaattcagtaatttttacctttctagtgtggttcactcacatgtgtttattctataaatgtcttattttataaatgttgacggttaggatctctaattacagggcatgaatatatatatatatattttttacctcatcttattgaagattctcagatgaagagcctgtagcctccagtggactgactttagtaaaaaggctttaattgcagaacctctgagttgactgtaacaaatgcagtttattcccctagactggaaataacaaaaccaaccagtttgagtttttgtcaaaactcaaactcggttatctgaaagaatttattatctgtagagtttcagtatgaagaatgcagttactttgaaaattaatgattgtcttaaatgtctgcttgtgattgtttgttaattgcttatttttgtccttttgtcctatctctccaaatctgtcctcttgtgttactgtgtcaatattaggtcatagccagcctccctccctccctccctcccttcctttccctgcctcccttccttcccacctttccctcattcccgcccttcctctccctccctccctcccttcctttccatccctccctccgttcctcctcccctcctcccctcctcccctcctccccctctccctctaccttccccctccccctcccctccctctcccatccccctcccctcccctcccctcccctccccttcccttcccttccttcctctaactgctttctctataatttttttcaagatatttaggttgctagtctcaagtataataagggatattgcagaatatttagatgcattagatggatcatattactcaatttttagtagaccagttactttgagtgactttttgttttggtgtgtagctcctaattcatggttgatttgtaatcttatgcttggggttaaggggtctgctctgcatgccctgtagcattttgatcgctggctgatggcacctctgccatccccactactgctggactttgtctaggatttgggaagcctgggtctgtctggattcacttggcctgttttctttcctcctccttgtgcttgtactccatgttggaagggacctgtatttgatgtctagaaatgtgcccttgtgaggaaagtacatcacagactatactagttccacaaaaggaagatcaacaaagcttttcaaaaataacatcatctttttaataactaaagtgttcacactgaagggtgaatggaagaaaggagtaagtttttggataaataagaattgtgggtgagcaggccaaatgttaaaaattctcttagtggtggtcgggcgtggtggctcacgtctgtaatcccagcactttgggaggctgaggcgggcggatcacaaggtcaggagattgagaccatcctggctaacacagtgaaaccccgtctctactaaaaatacaaaaaattagctgggcgaggtggcgggcgcctgtagtcccagctacttgggaggctgaggcaggagaacggcgtgaacccggggggcggagcctgcagtgagccgagatcacgccactgcactccagcctgggcaacagagcaagactccatctcaaaaaaaaaagaaaaattatcttagtggttatactgttgtagagtagtattgattgatgcatttattcaaccagcagcccttatgtggttctgctgtttcgtactctagtagatactttgagagctacaaaaatgtaaacgtgtgattcttgtcgttgatggatgaccttacctgtcaagtgaaatgagacatgtttttgtttttggttatttgccatttaaatggattttaaaatccttcgtactcactccaaagttattgttttctgcgtctggattctaccttactgcttctataaagttgcatcttttcatcaaaattatatatggtactgctaaatgggttggtggaaatactcattgaaaagaatataattatgacatagatcatatacatagcttcacattaagaaaagggtattgagtatttgaaacacttgacattgtgtttataaatatctactcatctagtccagcactgaagagtcatataagtacttaatttcagaggtgaatcacaagtggcattaaaaatgtatttttcttgttacctggggcctatacatttaatgagtttaaattattcctttggcctcaactctggtgggtaacctaattctaataccatggtgaatggttactgtgactaccctgttgctaagaaacctgttatgttatcaggttgccttggcgaagtaacggcttcttaggactccttagcaccgctgggaggttgttaatcagagctgtggaggaccttacagaattagtttccaaggttataactaatttttctttaggaagagaaataaatctaagtctgtaaaaactgaaagaaaacaaagtctaaattattttcagttaaatcatgacctttagttattttaaaaaaagtttgatcttgagataaaaacctatttttactagtatttttactagttacaaggatctatgtcttgaatggtggcaccccaacccccacccctcttaacttagcattccatttttgtttgcttagagtgattcttggcagggtatttgcaatgtatagaagagtatttgaactgagatcccgagggagaacactgtgtgaaattattttagtcatttgatatcaattgctcttgctatgaaatgattgaacattttattttaaacaaatggtacactatgtagcattttttaaaatgcaccacacttgatactgggtcaataattctgttcaaggcaggaagctggctttcacaagctttgctccatggcaaaaggtttcagatgcttaaagctccacaacacacgttaagaatctgagaagttgtgctgctgttaattttgtgtaacttagctctcttccacattgttttctctttttatctctatgcctggaggtgcttgttttcagcaaattacattttgagaaactctgttcttgactattgtttagaggtacaatgcagaaggggtcattcccatttgacaccattctcatttgtagcagtacaggttaagtcacaagccagcctgaggaataggatgagctgttcaattacacaggagtgggcacagttaagaacccaggctttggaattccagtcagagtgcctggacccaattttgggtcttctgcctcaaactttttgaccttaaatcagttacataatgacactaatcctcagtttcctcaacagtaaatgagagataaaaccctttagatttcaaagagttgtgtggattaaatgagattatatgaaatgcttagcataatttctggcacttaatgtgagcctttgtaaatgtacaatgttaattattatagaggacactttctggggagctgtgagttgtttctttaaatctgaaaggtttaggtacttggcatttgatgaagccacccacactaaagcttttaattgctgggaagatttttcagatttttaaatttaatttatttttaaatttaaccttaaatgtaaaaacatttttttagacacagtgtcttgctctgttgcccaggctggaattcaatggtgtaatcatagttcattgcagcctcgaacttccaggttcaaggggtccttcccacctcagcctcccaagtacctgagactacaggtgcctaccaccatgcccagctaatttttttttttgtagggatgggggtcttgctctgttgcctaggctggtctcaaactcttggcctgaaggatcctcctgccctgacctaccaaagtactgggattagagtctcccagcctttaatattttataatttatttccatatgtctttttccttgagtttagagttggacattctaagttttagccctaactcttggtctttctgggacatcagttttctcatctgtaaaatggaggtgggaattggctgacatttcaggtcacattctgtgatctgacccctgggagagcttggtgaaaggttcccttctgattgtatcctgaatagaagagggagggtctagaggttaaggacagccctcaaagtcttgtaatgttaggatgagccacacagatgatggcacctcacgtttcgctttttcttgtccaaagaagacagccggagctctcagagtaagtgagttaattaatgggcagtctgtatttgggttaaatatatgctttcggttattacttttctcttttttaaagaacaattcttggctgggcatggtggctcacgcctgtaatcccaccactttgggaggctgaggcggacggatcatgaggtcaggagtttgagaccagcctgaccaacatagtgaaaccctgtctttactaaaaatacaaaaattagccaggtgtggtggcatgtgcctgtggtcccagctactcgggaggctgaggcaggagaatcacttgaacctgggaggtggaggttgcagtgagccgagatggcaccactggattctagcctgggtgacagagtgagactctgtctcaaaataaaataaaataaaataaagtaaaataaaataataattatttaaaatgtttgaaacagcctcaaaactgcagaattgttacaaatacggtgcaaaatacttgacagcacttgttagctaaccccaacttagtttagagaaataatttgaatagcacagagaacatgttttttctgaaccgttagagagtaaattggtctcttgatgcccatcaaccctgaatatttgttgtatttcccataaacaaggatgttcatctgcataactacaatacaaccatcaacattaggacacttactttgatgtctatatttctactgttgaatcctcagaccccattgaggtttcggcggtgagccccacaaaatcctttatagcacaaggattcagttcagaattatatgtgtcctttagttggtgtgtctttttaatttctttgagagtggcacaataatgcagtctttttcagaatgctgtgaccttgttacttgtgacagttacaggtcagctgttttgtagaatgtcctatttcaattagttgatatatcctcatgattagatccaggttatccatctttggcaggaacatcacagaagtgacactgtgctctcattgcattctttcaggtggtcataatattgatttgcctcattactggtgatgatcactttgatcattgactaagatggtacctgccagtcttctccgttgtagaagtcctaattttcccattgtaatgagtaaatattttgtaaggtggtagttcaaagtgatataaatattcctttgctcatcagattgttgatttattcattatttgtaatagtaccaactcatggttttgttacaattcaatgggttatatataatacattactatttttttaatgctcaaaattcctttaacccatcttatgtgtgcttttaacatgtcctcttcattctttgagcacatcttttctggttcaaagagatgtttcatattcatcttgtacttttcctgccttagtcctgaatgagccatttctctaagaagtcctggcttcttttttaatagagaatcgtatttagaagccaagatctgtgggggggtacatgtgcctgttagtattgcagttgtgcctctccaaaactcttagtggatagagctggagaatacttgaatgtatgtatgaatatacttggacactcaccataggtaatacacatgcataaaaacacatatttatttttacatcttactatgtagtttgatatcaaggagtttacactgatacctccaattctgatccaacactcaaggggttgttctaattctttctatatttgtaaaacttctaccatttctatgacagaaatctgacacgtgtacatgtaaccagcctctcagtgcatctttccctcacaccctaggctctgatacctgatgtcagactgccatcgtaggtgatgtcttcctcctgactgttttccacattgcataacaggccattcttttatgtggatactccatgttgcgctgttcccacatctagacatcttccttatcccactcctgactccccatatcaagctgaccccctaagcctgggatatctaccttggaggtagggaataggaacaggaagaagaagaagagctcttttcttttccatttccttgataaggtctcattctgtcacccaggctggagtgcagtggtgtgatcatggctctctgcagccttggactcctgggcttaaagtgattctcttgcctcagcctcccgagtagctggaactacaggtgtgcaccaccatgcctgggtgatatttaaattttttttgtagatacagggtctcactttgttgcccaggctggtcttaaactcctggcctcaaatgatccttcctcctcagcctcccaaagtgctgggattataggtgtaagccaccatgcttggcccattttcatttttaatattccaagggaagctgtttagaatattttattttattttttatttttttttttttgagacggagtctcgctgtcgcccaggctggagtgcagtggcgcgatctcggctctctgcaggctccgcctcccgggttcacgccattctcctgcctcagcctcccgagtagctgggactacaggcgcccgccacctcgcctggctaattttttgtatttttagtagagacggggtttcaccgtgttagccaggatggtctcgatctcctgacctcgtgatccgcccgcctcggcctcccaaagtgctgggattacaggtgtgagccaccgcgcccggctagaatattttatttttgaaaacactattgaacttaccaaggaaaatgttatgtatacagttaaatcctttcttaatgtcatcaataggttcttggaaactgctattttaagcaaaatgatgtataatgaaactaattttaccataggctaattgatataaatagaattaaattcctgtggcatattttaggcccccaaaacatcaccaaacttctaaacaaagaccccaaacatttctaatggtaaacatggaaataaatgtgagctatacacacatttaagaaagattgataaaaacaaggaagacaattatttacccagtgagtgagtgacagcagtcatggtggtggcaggttaaattaaggaataaatgtttgcgaagtgaaaattgtgaggaacatctcctgccaccacacagtttacaaacaaacaataaatatggtgggttctctgcgcgcttttgtgtttcgtgcatttgtatggttaccatatactttacacatttctgttttacaatactttgtattcattcattcattcattcattcattcattctctaacccattattccagttcagtgttgcgggggccagagcctatcctgatattacaaggaacagatggaacccaccctggacaggatgtcattccatcacagggcacactcaaacacatacccacactcacttagactggacagtttagacacaccagtgcacctaatgtgcacatctttcagatgtgagaggaaactggagtacctagagaaaacccacacagacatgaggagaagagaacggggaaactccacacagaggccttggccaggagtcaattttgttttctcttatcaatgttatcatgaaatgatgttgaatgaaacgttattcaaagacctgctgtatacagaaggtccccaatggttagacttgtgattttttggctttataatggtgcaaatgtgatatgcatttggcaaaaaccatatgagtacccgtgcaaaccattctgtttttcactttcagtacagtattcaataaattacatgagttattcaatactttattataaaatagtgtttatgttagatgcgttcacccaactgtaggctaatgtaagtgttctgagtgtgtttaagccaggctaggctaagctatgatgtttggtaggttaggtgtattaaatgcaattttgacaagatatttgcaacttatgctgggtttatcagaatgtaacccccctcttaagtggaggagcatctgtaattgtttttgtcatttgagccgtagtttaaacaaatgaatgcaatggtatattccctcagataagtgacctagcttgaaaaataaaactgtacctgaaaactaggtaaaaatggatcttgttgtttgggaggggaaagagaatttgaagcgttttctcaaaagggtacccagcacccgagtacctttcttttgtttaatttttaacaaaagagctatctttgtggcaattgttttcaatatctctgccgtacacatatgtgggcagaaagctagagtttgaataacacttgttaatggaaaccaacttctttatggatttgtttgaacagtggttcagaatttttatgcttactatcttattcctgtttgaatacttggccagccatattctcagagctccctgccccagccagcctctctaatggctcctacggtgaagttctgttagcgcttccattggaaacctaccagaatggctgggttctggcatggtgccctctcacgaaagctgcagccccagtgggggaagcgcagggtggagtttttccaccctgcttctggctgctctccagaccctggagtgtctgtgaggttttttttcctcttttctttctcccataacaacaaacaaacaataacactactacttggacatattagggacatgggatatgcgtgcgtacgtgcggtggagtgggccttttagttagctccccagcagtgttcttctgccactgggctcttttgttcagtgtgacctcatgagaagtggtagcagtactgtaagctctagaggatttccctatcatgggccttttatttccctgtggttgtctaagcaaagcaatgggaatctcctggtgggtattaactatctttctagaccattctttgcacgaaatgctgacttaatgagagtctgagtcacccttagcaatttctccaactccagaccatggcgtgttacaagatggcagctgtttagtggatatcagaatagccttcatgttttcatggcagggttaccagatttaggaaataaatttacgggatgcccagttaaagttgaatttcagatatacagcatttttttagtgtaattgtgtcccatgcagtacttgggatatgctggtatgaaaagttatttgctgtgtttttgaaattcaactttatctgggtgtgctcttttatctggcagctctacttcgtgcatttttgcatgatgtaataacttggatacatgttgtacttagaatattatgtatatatgattagttcctaaaaagtgactggcttcacaaataaacccttgagtgcatgaaattttgagctccttaaaaggcaactgcagttgagctggcaaatcacatatgccagatttccagactgagttgagtcggccatcatgaggcaggaacttgaagttacatcatctagaatttcccggtaccctttttttcctccctctctttaatgactctttatttgtaagttagaaatttgggctaagcattccctgcaaaaaggcgtctttcctttattcattgaaaaacacagaaatctttagtcttaagcaatacagactggtctgtatgaggttgtatttgtgcatgtagaaagaaaaagtaagaattttataaagccttctgccttgctttggctttttttcggccagtatttccttttgtgtattctacaagaagaccagagaactacacatgatagtagtaaagatccctcccgtcccctgttagatactttctgtcatatcctttgacacacttgattcaactaacacccccttgtaagggcaagtggttattcctaattttgtaagttagaaattctccaaacggaacagtgtattggtctctttcccaaaggatgcaagatttgtcttcttataaagtcttaagaatggtctcattaaccatctgttattgaatgagtagattcccgtgtagacccttctgttctcagggcggtcattccaccttcccctgagtctctggtccatgacccctggaagagattgcctgaaagcacattcataattttgctccacattcatgatttggcttaaacaaaattaagaattattacttgagcctttttaatagtttgctgcgggtgtggcacactttttctgtaaagggcaagatggtaaataacatgctttgcagacatacagtctctgatgcatactcttttacaaccctttaaaaatgtgacaaccatttttagcttgtgagctgtaccaaagccggccatgggctggcagtagttttcctgagtgtttgtccttaaaaacatattacatggggagttctgtggattctgaaatttacccattattttcgatatatatagaagtgggaatgaatacttagcaataaaaatatgtgacaagctgtgggcactctaacatcctggaggacattgtctctctccctgccccccttcccctgtggcacttactcatatttttaaaaggagaatgttgtaatttcttgttaaaattttggattttgtgttaatgctaaacaaaatgtcattctgatgggtttcttttgtcaggtatgtaggagcaagtggtcagatagcaaattcatgcccaaaggcgggagaaagcaagacaggacatcggtttgtcttctctttgaatttatttatttatgacattgaggatttggtgaaattttggtataacagaacatcctagccagtttttctatctttctgagccatcaattcttaagaaactgcataagcattttattttgaaaccttatggggaaggatgttacattcacataagaatgaaactcaataggaggtttgccctttgatttgctttatcttttcgctgattttctttgaaagattatgcttggtgttcttccagatcgcagtggtaacaacaggcaggctcccaaaagcacctaaggggagagacatcccatgagaatccatcatacatttcatacctttccagctgctgctcttagtgattggtgtaaagccattcaggcaccccttgtcttttattacacaatgaaattggggtatttcccgtcactttttttcccttcagacttttacaaatgatttttgggcccgaatgtgattgtgaatagacagacatagcttctaagaaagccgttgggacccactgaattgtgactgtcagacaaaggcattttgtttagaaggcttgtcccaaagtggtgttggagtctgaaagaagggccgccagcgtctcgttctttctgctgtgaactaataggaaagctgatgtttgctgagtggatggctgtactcactgtccaaacagatctgtgtttgccaactgtgaacatattgctgcctctgtgaggcactccatcatgccttgaatggatcctcttgtgttcagaattttctgactcaaagcgagggagagagaaatatttctttcagacttcagcattcactgtagcatccatagtctcatcagacctttagaaaccaagcatgcaccggagacgcttcttaaggagagtgagaaaagagcagagaaaaaggaataaagagacagccccattgaaatgcctttattctgaccatttgtggccaagttttcataaataaaccaggctgccttggcaaatagaattgtgagaatattttttatttctcctgagcaaaatagaactctgagtttccaactcatggtccatttctgtgcatgtatacatacatgcacagacaaaaataaaagcatagaatacatttataatgtgttattaaatgggtgacagagttttattccacctggataatcccttaagaaaaggctaattgatacatatgaaggagttttgattactttataaactgtctcttagttttagggttacaaacctattgtatatgaaagggtgaaaataaagtgggtttttttgttgttgtcagtttagtcactttctataagttgacagtaatagtaccttctggcaaagtctagtattcgctgcatgaactgcggacagagcccatggaaaagatgtggcattccttgcaattacccattgttttgtgtgttaaatttcagaaaccttggttgagtgggtggaaaaacaacattgctgataatgaaactcagtgagcacatggcatgcacaggacacttaccattctggtctgtgttgcttattgagtacatgttcaacactgaacagcttcactcggcattgtagtggaaatggagagagacgggaaggacagaatgcttttgtgagtggaaaggtagatttctgtgtagttctctgcagcagtaaaccgttgcctggccttagtcagtgagaactcagtatttatttgcctacctgtagtaaatgatttttttggcatatataacccataaaagtttaaaaccagaattaccatcccccgcccaggctacagtatttaccatttggttgtctgggtattcttatccaggactaactgtactcatggaaaaatctagttctttaaacttactggaaatataacaggaatagcagggacagttggggtaggagagggcctggcaaccatggctgccattgatgtaatagtaatgatctcagctagcccagctgggaagccaaccatgtgccaggtactcttctaagtattttatatatgttaactaatttcttcctcagacaatcttgtgaaattgttaccattgctttcttcattttacaggtgaggaaaccaaggcacagagaaaggtttactaacatgcctaggatctcacaactagtcatttgtggagtgtggaattgaagttagaggaggatggccccagtatctgccacaattactacagcactacggttggcgagggaagaaatctgcattctccttgtagagttttctatttatctttcctttatttcttggagtatgtgtatcatatcatatggttttggaaaagtgtctgaaggtcatcaaaatctaagtactaggaggctaagatcagaaagataatgcattctgtaggtaaagaagtttgctcctctttgtttttgtcacagaaagaagttccacatttaattaattcctggttattattattataaattggttgaattacattgtggtctagtagatagggctgggtaatacattttgttcagaacttaattgagagcttgattttaaacttaaagtcaaccattatgaggtatcttagtataaaatcaggatatttatatgtagttagatgctaatataaaaatattcaatcatatttctttatgatgatggattgagcggggatatgtttatatgtaaagcttggaagcaacatttttacaaccgtagggtaatagtactattgcctagtgtaagtagcttttctcaagagactatagggatgattgaaattggccagtttcagatgatttttataggagtaatgtttattgcagctcattaatgccatgtttaatagttactggttatctgaaatgttgccctgagtggaaagggggtcatatggttccattgctagaggattggacctaaaatggttttgcgtgaataatgttgtttgtaagttatttcttgggatcctatctcaaagaaagtgtacttgaaaggccaggcgcggtggcttatgcctgtaatcccagcactttgggaggccaaggctggtggatcacctgagctcaggagtttgagaccagcttggcccacatggcaaaaccctgtctctactaaaaatacaaaaattagctgggggtggtggcgggcgcctgtaatcccagctactcaggaagctgaggcatgagaatcacgtgaatccagaaggcggatgttgcaaggagccgagactgcaccattgcattccagcctgggcaacaagagcgaaactccatctcaaaaaaaaaaaaaaaaaaaaaaaaaaaagtatattctggagactatattttagaaagtgagttataaaaaaataaaaataggtcacactttattgtgatgttttatgcagtttgtataaacaccgactgactgaacttaaaatttttgcacattgtattgaccacatgaaacctatcaagatgttttagtatattgggtttgctataaaactaaagtttattcaggtttcttcttttgagagagagattatgacaaaagaatagcttggctttctgccccaagaatctttgttttggccttttttgcctttgttttgcttattttgtatgtattggacctgtttttgcctattttgaacctgttttggaggggctaccaaactgccaaaccaaagagctcatcacagaagaggcaatttcacacccagagaattggtagtcccaactttctgaatgacacctaagatcattaccttaatttttttatctgctagtcagtaattttcaacagtcttttctgcttggtttaggtttagtctgtaaaagggaaacaggatattaatttgcaagaaaacctggagaaattggaaaacttctgttgggtattacttttgcctgatacctactcaaaattagaaacagaaataccttatattattagcactttctccacaatcattaatattaaaaatacaatgggtatcaaataaataacacagtttacaaggaaaaaagtgaccaaagcaccctgtggatcagatttgactacttgctgcttttgtgaacttgtgcttcactctgtgtttctgttctgtaggttttgataggctagacttctccagatatattaaaacatgaataatttggtaaataggctgaggttttattgaggtttacctgggctcaggagggaggacaggtgtgctgattggtccatgggcggccatgggcggggcctggaaaaagtatcatccaattggccaaaaggcatcaaggaggttctcactcccagtagcagtggctcacacctgtaatcccagcactttgggaggcctaggtgggtggatcacttgaggtcaggagttcaaaaccagcccgaccaacatggtgaaaccctgtctctactaaaaatacaaaattagctgggcatggtggcacatgcctgtaatcccagctacttgggaggctgaggcaggagaatcacttgaatccgagagaaggaggttgcagtgaaccgagattgcaccactgcactccggcctgggcaacaagagcaaaactccacctcaaaaaataaaaaaaagataattcagtaaaattaaagggttgaagtgtagcttagtaaaaccttagccttagcaatgctttccccagtctttagagggaagatttgtttttaatttccttgtaaatttcattctataaagtccatgctggacagcagatttggtgattaagatctgaacctttatttttttctttcctatagctgacattagtaagaatataatatattgtgatatgaacacctgggaaagaaaaaccgaaggtgtgatgaagcacaaattaaaggaatctgacattttcccccaactcctggggaacaatagtagtttgaactttaatttactgtgcagttagagcaatttaatagattaggtggacatgctgtgtactgtcagaaatggctttttcaaaacatgaataataatacatatatttattttgagcccttctcatatagccttctcccagaggttgagcaggttagggggcatgagtatatcgagaacaaatggagaagaccgaatgtgtagttttagtggacaatatggtttatttttattatttatttttaaagttgctatataatcgttgtacatattgttggagtacatgtgatattttgatacctgtataccatgtgtaatgatcaaattcagttactgttgagttatcatcacacaggatccttcgggtgtcacttcaccagccagaaacctctggccggcggcgcctctgcttgagttttgctcgtgccttctgggcttcttctgcccacttggcctggatcaggcagcaccaccggccaggatcctcccctgccaagggtgcgccagtcacggagcggcgaggggtgtctaaatgattgagcacagggtccggccactgtgcacagctaggcattctggctgttgcagtggggtgggcagctccatgcaccagcataggtgctggctccgtgcaaggctgtggctggaccagacataccacaagctgtgggtaccagtgtctggatgaggggaacacagtggcgcctgaaagcttggagatgccaggaaccacagagccccaaagagggtgttacagcgtgtcacagccctggctccgggagccctgagttctgggctctcagtagggccacacctcttctctcctcattgcctacagtgcgcagtgagcgggggtgggggtgggggtcgtgtttcagcctgtttgtgttacagctctttcagtcatgcttgcctctggctcctgggctggtccagcaccaccactgcttcctgttgcatgaggtggctgcctagtgctggcagagggcgggagggctgtagtgttacagcccctttagctgccgcccacagctgggcaagctggccaggaaagtgttacagctcctttcgttcctgctgtttggtgggtctcgagtttttcttccacatccaggaagaatgaagttacacgggcaactggagggtgagcaaggccgagaggagctttattgagcaacaggaacagctctcagtggagaggagacccaaagtggttagcacctatccacagacaggtgatgagtcgctgagtctgggggtttttatgggctcagaagggagggcatgtgtgctgattggtccatgggcggccacaggcgggcctggaaaaagcaccatccgattatccgaaaggcatcaaggaagttctcactcccagtagccgactccacccagaactggcagcctcgaccataggcttcaggccctccctggcttaaaggtggagtttcaccagggacctgccccttcctgcctaggaaactgtctgcctcccaccactatcaatatgccatccatggcgcccaggctgtccggcccgaggggcacctgcaggcccgcactgaactgccctcagccccttggcctccttcccatgctcgttggtgcccaacgtctggagggagtccaggcagcagggggctgacatgtcagtgctgccctgagcacacacacatccggctggctcgcaacagtgcccaggctcagccacaactgttttccgactggagtgggtgccagggacagggagaggccagccagggagtggaagcaggcacttctgagcctgcgggagcgcagggatgcctgggtccagagctgcagctgggtggctgcagctgtgcccagggacgcaggctcccaccctgccaacttggtagggcacagggttcccaccgggatcacctgttcccagcccccgccagctccacgaagccgccccccactcctccatgcagttggcatctttgcagtggctgctccacgtgggctaccactgctatcattatgatatgttttgataaaacagatcattggatttttcttaagagttctgcatttttccttaattttctttttttgttttccttttttcttttgaaatggggtctgtttcactcaggttggggtgcagtggcaaaatcatagtcctgggcccacacaatccttccgatccttccacttcagcctcccaagtatgctgggactacaagtgtgtgacatcatgtctggctaattttttatttttaaaacttttttagagatgagaatctcacttctttttttttgcccacgctgttctcaaactcctgacatcaagtaatcctccctcctcagactcccgagtgtctgagattataggtgtgagtcaccgtgcctggcaaaatctgcacttttgtagtattttgttttagttaaacttttcagccaagtgcaaaaaaatgaaaagatttgcacatgaatatgcaaacaggtatgactgttgagaagaataagctaaggttttagggaagcaaatattcttttttctggctcaagtgagagaattagctcagcttagaagttacttgctttttggatgtgttacttggatgtgttactcggatgtgttacccatacatagaatcattaaatcattatttttatacacattcttagtgagttgagattttgctgctgacacatttgcaaaagttgggattgaaaattagagtttcttgttcaatgctttactactctgctgttccagaaacctttaagttaaagtaacagattaaaatatttcatatgaagagaactttatgatttcatatgacaatatacacacactgaaaaacataaaactttaaatattttaatgattgcaaagagtataacataaaaatgactcataacataaatgtaaaaacgtaggtttttaagcagtgagtacagtgctgattggaatactaaggatttcaataacctagtgtaattcaggatgaagaaacagaaatcatgaccttcttcagatttgaacttggcgggatcctgtttgcaggctctgcctgtctctgcagtgggttgagttcctcattggtccactgaccctggtgtagggaagaggttgactggacttatttctgaatttgactgtcagtagcccagggttataatgatttcccacaccttggacatacagaaaatgataaaatataatgtttttagaacctgattttgcaaaggggcatagataaggtagattgttagaaggacccaaggggaatggttggaaggcatgtcatagaaggagaagataaagaaagcccagatgatttttgcctgtagaagaggagggctgatgggattcaactgcctaagtttgtatctaaatcttgttttatggaattgaggttacattttgtttgtatggctcttaagaacagaattcagatttctgcctttgaaaaaggggaaaccctttaccagttaggattattaaaaaatggaatttctctgcattttgagatagtaaactctacattgaagtattctgctacttgttagaaattttgttcaaaacttcaagcattaaatggggaattggtctggatgactgttaagatccccaagagaattccaattctttgatcttagctgtcaattaaagatgtttataaatgttttatcagctgttctacctacttccttattcttagatgtatactatttcatattaaacgatcaccagggaccattaatcatataaataaacagcaataattgcatagactgattcttcatagagtgcttattatcctatattatataaaatcctgtgatcattttgttgttgccatggaagtaaaacagtggttgctttattatgactaaagctgggggactatttttagccaaattatagtcatctttgccagctgaagcatattcaattaaatatccattaataggataaagtttatggaactctgttaatgactctttttccctctttacttttaaacattgtgatgaaattaaaacttagctaattggactcaaggtaactacaaatgagatgtgcttcaaggatcttgaatgagcctgtttttttctactttctatttattttttaccgcgttctttccaagtcattcttctgaactggtccgtagcacatctgcatcaaaaccagtgatcagggatggcctgaggaagttgggctgcttgtggggagaagcagactctgaaggcctggaaatctacattttcaaaaaggcctagaaattttgacgtagcacatttgaggatgatagcaggaagaatttagaaattgtcagctaacacctgttttctagaatctgcaagcacagacctacgtgacaccagtaccaccactaccacccagcatattactctagaaggaagcacagaaattatcaggtttcttctcttttactttgtatcatgaacaattaagtaacttgcccagggccatacagactgaatcccatatctccactgagccatttggttttgatggggatggactgaagagaagaactttaaaaaatactattggaaagctgaaatggaccagtgaccagcctctggattcctgtgatttgtatcagttaccgttttgaatatcatgcatatgctatggtcacagatctcttaatgtatcacgaggacagttggaaaacaattcagttgagattaattgggtacatgtattttctggttgtggcttttctgccttgtttgtagtttacacaccaatccatgaaattatttccttcctttttctttttcttccatgttaggtatctgtctggttcctcccttctttttcaaagagaggatcagctttctgccccagatccttctttctccttatctgttctccacttgattttagtaacatttctgtgcagacagcctaacagacctgacctcagatctgtggccagaaaatttttactcaaatactttgacagtgttttactcatctaaaagtgaatgtgatccctagacaagtatgaggccaaaggtgcgtctcattggacctcaggccatgtgagcatacgcacatgggaacatggggattcttttacagtttaagtcatggggaagacaagtcataaaccacagtggtttctcaaaggcagtgatagagataaggtgatgaagaaactcctatcttctcagtattcacagttttgtctgagtagggatgtctggaaaagggaggagtataatcctaaagttttgccttgaagggatttatgagttgctcatatttatatatcatgcatatcatttgtttgtgctcatactcttgcttaaccagtgatagtactatatgcaaaactccccattttgatgtagtcttgtttttagtgattacctggtaattttgccttctccccattcttacctatcctaatacggcctcggttttttagcctttccagattagcaaaccccaaaggcttagtagttgttttgaggagctaactttaaaatgtatctgttcttgttgctttttcagctcaggataaacagcagtgaatcagttaggagacctttctggtagcctgttaccccaaatgtagacccttgattttgatttgtctcaggcccccttagtagtagatgaagggttggtttttgaaagtgaaattgtagcttgtttagtaaaaattgcttgtttctgtggaggcaatgtgccaaaattagaagcatctatggtgccgcgccataaagcagtctggtgcctctcaaacaataactttgtcagttcatttttatggctgagaaaatagcagtctaggtgaccaactttcccacaattgcttgggggtgtttactgactgcccttgatcagacgccaaacacttcagaggtaagagagcctaacctatttgtagttgttgtttaccctcagcccttagcctgccctttgtttttcacttacaaacaaaagagtaaaatcaacaggctggtctgtaagaactctcatttactttccggaccccttctgtgtggtttaggtaaggcagagactggaactatatacatcaaactaatcatctcacagcccattattaggtcccagctgccggacaacttagaggatttttattaacaatcaagacacttttgtaaagttaagttaatttttggagattgctggtcccttccagcctgacactgaagtgatgatgagtgagtgagcagccttctagattggcaagaaagtggcatcaggtagataagctatgactctgttttatggaatatttggttcatttttttttccattgagcagccttctagattggcaagaaagtggcatcaggtagataaactatgactctgtgtttatggaatatttggttcatttttttttccatttccataatcacttttgattttccttagtagttctagtccatacatcctggacatttctctcttgcctttggattttaagtgcatgagttaaaagaactaagctagtaaaccacgttaggatgttgtcaataaaatgcccttacagtgttgtcaaagactttgctttatggcaggcactcttgcaggggcaatggaagagccaaccctgagagtagttaaaagggatcttctgtggtttgctttgtaagcctcactaaagcaacaataattgaaatccctgaaatatattgagtaatgatatgttggtaaagcaatacatgattattacttgtcatacagctttcaggttggtgatgtttttcatgttctttcatttgtaacagatgaataatgtaaaacagagcttgtgaggagtacaatgacattttgttgtctggttaataatttcagcactatttgcaaaattgccctgccagagcatgacctaggaattgtaaagtggaacacaaataaaataggaaatgtgtatttgcccatgagttcttcatggacttgttataaaaacacttgtttgctgtcctgtcttttgctcacttctctgtccccactgggagaagagggccttgtggccaggcaaatgggatggaagtgggggtacatggaggaagagtagacaaggttttattcatctctgttccctttcataactcttcctaagagcagagaaagctggtgagagaatgacaggcaaccctgttaaaagactcggaggctgggcgtggtggctcacgcctgttatcccagcactttggaaggccgaggtgagtggatcacctgaggtcaagagttcgagaccagcctgaccaacatggtgaaaccctgtctctactaaaaatacaaaaattagcttggcatggtggcagacacctgtaatcccagctactcgggaggctgaggcaggagaattacttaaacccaggaggcagaggttgcagtgagccgagattgcgccactgcagtccagcctggactcggggccagtgcagcaaataaattctgccccgttcctgctgagacctcccttagttgctctacttgcatcgacttttaatgagcaatctttctgattcttttctctacaaaatgagtaaactttaacatcttagtctgcattttacctcggggcatttaaaatttaaatagccttgttctgataagcagaatagggggtaattttttaccctcaacaagtttgtctagaggataccactaggagtcatgctcacctgttcctattcacctctcctgggaactccgtcttgagtttgttattagctgaaatgctaatagatcctcttcacgctgtgtgagaaagtccgagggcgtctcggatgcccttcatgtgccaaagagagaaaatgctgggatggtttgcttttaaaggttttgaaatgaagcactcgatgctctggtgatgcctttgttttaattttgctgttgatatttgcagggactttacttgttaaatatcagaagccttttctcagtattattgagttgcatttgtataattctttagggctttaatgtttacggggtcctggtttaagtataaataagcctatctttggattacctgccattccaaacctgacattaaagatcaaaacaaagaaagatgggatcttagtattcatttaaataagtttaactggctgggcacagtaactcgcacctgtaatctctgccctttgggaggctgaggtgggaggatcgcttgaggccaggagttgaaggccagcctgagcaacattgtgagaccacatctctacaaaaaaatacaaaaaccagctgcacatgtagtggcttgcctgtagtcccagctactcagctactcaggctgtggtgagaggatcgcttgaccccaggaggttgaggctgcgttgagctgtgatcatgccattgcactgcagcctggatggcagagcgagaccctgtctcaaaataaataaataagtttaaatgataaggtaatcctgaatgttgtttatttgtagcctaagtaaattatgtttcaaactggggcaaggtgataaagtttaacttgaagagcagagtcctgagaccctgggagattcagcttcaccgtcactctggatgtatggaacccactgttttttgtttttccaaagataatttcttggaccttttctcagaggtcttctacctaactcttcaattatttctgttgctagatcagactttcaccaaatgctcatgctgcttgagttgtctgggctatatgcctgactccatgctgagatacacagaaacctcaggccaaaagctgggtctccccgtcccccacatggttctgtgcacctgtgcattactcattccgcatgccattctctccataattaagaacagaaatgcttgttctcttcaatgtcattgtgtccttggcatcctgcacaaggtctggcagttacgttgggttcaacaaaagtttgttgaactgaacaaagcaacaaccaagggttctaaaaactggagttgaaggttatattacaagcctgtctcctggtacctgatgtctttgacagtcttaaagcttgcatttctgtagccctgaatttaaatcaagttctttttgaaaccatgttaggtcatcatgcctgctgtgaatggattcaccaactttctgtaccattcattgctagtcactgaattttgaatattcttcccccacccactctaaggataattgttattgtccagctccagagttccttgcctctaatgaaacaattgctgctgctttatgcagtagtttgttgtttatgtatgtgttataaaatcttctgtgtgactttcaattccttacatcttgcacaatgaatgttgattgaatttaataaaacataagctaacaaaagaatagcattatgtatttacacaataagtgtatagggttttttttttaaaaccatttaagcctaaaaacaacttgataaagtagctaattgggtagatacctcaacttcaatgaaattgaggaaaattgggatttaagaagcttgtcttatgtgagaattaaaccccggtctttctattcctgatgcccttaaaacagctaagtaacaaaacaagttcaaagaggaatgtttgaaagaaaagacttgaatttcaaattggcaagacagaattgttcactaacgctggccttgtgatttgaaatggccaggtgagaagatggtggctacccttatttaacaattctatcagcaactcagttttggttcttggtagtgatatacgttaagattttagcaggaaaatttagtcattgagcaatttgttcttttggtcacttgctccttttaaagacaatgactgggccagactagaaattcttgaaataaagccaatgccagagaaacggagaagatcgactttcaggaaaaaaaaaaaaaaaaaaaaaaaaagggctggtcctttgatttagagctgtctgaggacatcccgaaagctggcacacctaactttccaagatttcctagaaattggggaagcaggacaggtaattttgggagacacagaggactagggttggggggagtagacaactatgacaaagcagccacccttaccttgttatttttattttcttattttttaataaccataattaggttatcgtgaagatactacattttcaagaggaggatattcttgccaagctataagatggaaagatactttaggagaaagaatgtgaagagtaaaaaaactcacttgctcatctaagaaactgtgtaactcatttggcctctgtggtgaatgataacactgtgtgaacctctttgttcacatggtatttttcttctactggggcagtgtgaaagttgttaagatattattcatcgaggcacagtgctaggtactttatatgcattacatcttccagtcctgcaacaacccttgaaattagcagctgtcatcccttttggtaggccagtaaagtgttgatcagagagttttaagtaatttgccccaaggtcatgctagaatgtgatggagtccaggtgcaaactcaagcctctttagcgccttcctgccctgtttcctctctggctggatgcctttgggaagaagtagtcacaggttggagagaccagtatgccttccatcattttacctgagccagaggaagtgccatcagtacctagcttctgtgtgaaaataacaccttgaaagaagacgagtttgccagcagcagtttaaggaacaagagatcttgctttcaaaggaaagtgaaattagaaaaacaagaagaacagagttcttgtccctgttgttccatctcttgcctgctctttcctgggctggtcagcttgcttctgggcctcagtctgtttatttgtaaagctgtgagacttctactatatcctaagggcctttgacctcctcagttctgcaattactaacgtttccacaagatagtaatctttttaaatcttgtaaaatttagacagtgcctgaaatgccttcttgtgtttatttgtttatatgtctgtatccccatgcagttgcttgtggatagacaatgcacctcttggcctttgcatagcacagtgtctagaaatagtgtccttacaaatatgaatgtatgtggaatgaaaatgtgctctcagagatttatatgcagttgctgttttgtagcttgttagtaaccccagttttactaccttatctttctttggttatttgcataatttttcaattctttttttgttaaggtgaaatgcataaaacataaaattaactcattaagtaaatacacctattcacaatgttatgcaaccactacctctgtttccaaaacgtttttcatcaccccaaaaagctgtacccattgagcggatgctcctcagtcctgcaaaccttccacccaccctcctgcctcagcctttggcaaccaccaatctgagttctgtttctgtagatttatttattctgaatatttcgtgtaagtggaatcacacaatatgggtgatcttttgggtctgatcctaatgctttcaagctttatcagcattgtagcttgtattagtgcttcattcctttttatggtggagtagtattctatggtttgtacacattttatccatccttctcctgatggacatttcagctctttctatcttttgagtattgtgaacatgaacacatgtacaggctgctgtgaacatgcctgtagatgtgtttgtttatgtgtttgcaattctcttggatatattactttcaatggcaaaaaacacagttacttttgcaccaacctaatacaagtaaaagtggaattggtgggtcataaggtaattttacatttaactttgaggaagtggtacagttttccacagtttctgtttacttcctaccagcagtgtacaagtttccaatttctccacaactttgtcaacacttgttattttctgtgtgtgtgtgtgtgtgtcttttaatagccatcctagtgtgtgtgaagtggtatctcatcatggttttgatttgtattttcctcatgactgatgatgttgagcatcttcttatgtgtgtgcatgtgtttgtgtgttggctatttacatattatctttggagaaatgtctattcaattcctttagccatttttaagtagggttgtttgtctttttgttgagttgtgagagttcttcatatattctggatacaagtcccttatcaaatatgatttgtaaatatttttcccattctataggatgtgttttcattttcctagttatgtcttttgatgcacaaaagtttctaattttgatgaagttcattttatctgtcttttgttgcttgtacttttggtgtctatagatctgttgccaaatgcagtgtcatgaagatttacttctgttttcttctaagagttttattttttttaagcttctataagtaggtctatgatccattttgagttgatttttgtatatgatatgagataggggtccaagttcattctttttgtctatttggagtccctggaattttgataggattacattgactctagatcactttgagtattattgctagcttaataataaatcttccatggctgggtgtggtggctcatgcctgtaatcccagtactttggaggccgaggaatatcacttgagccccaggagtttgagatcagcctgggcaatatagtgagactctggctctattaaaaaaaaataaataaatcttctttttcatgctactatttagcagtgttttgtagtttcagtatatagaccattcactccattgattaaatttatcaccaggtattttattcttttggatgctgttatgattggaattgttttcttaattttctgattgttcattcctggtgtgtagaaacacaattggctttttttgtgcagatattataccttgcaggtttactgaattagtgtgctagctctagtaattttttttgtgggatctttgagattttctatacgttgggatatgtcatatgtgagtagataagttttacttcttccaatttggatgcctttctttttcttgcctaattgttctggctagaacttccagtacaatgttgaatctcagtgatgaaagtggacatccttgtctagttcctgatgttggtggaaagtctggttcttatagtcttctgtctcatgaagtcagagcttatcaaagcatggtccctagacagcagcatccataccacctgggaccttgttagaaatactcattcttggaggttccctctgaactttctgattctgacactgtgcgaagtggggcctagcaatttgtattttaagaaacgctctagatgatgtggatgcacactgaagttgaagaaccactgcagcagagttcgaatttctttaaagttagcatctgtgctttattttctttgtcttccttttagttcccttgtgggattaatcagtgttgaataatttaaaaaaaaaaaagaatgtcaaggctaaccaaagtgcctacattatctcttagcttgtgtaagagtcttgagtcaccatgaatgattgcagattcatcattagacatttatgagattcatcagaagacctcacattttgtatgcagtcttagacccattgcaaacagcttaaatgtacttgtatttagaccatttgttctgataattactttcaccattattatctgtttacctactagctgtggccttatggctacttctgccagcaagaatttctgttcctcagctatttaaaaagactgaagggtcacttttataggataaattagattttatcacatcattatttcatctttgccttattttcatcttgctatgttgtgatgtcaactcctttacatcctttttgagcaagatgatatttaaatcaattaggaaaaaatgtgatctattgcagctaatggctattgttgaaaaatagccgtttagacacacaagtaccagtttatagacaagcacaataattctatgaattcattatcagattatagacaagcacatgaatactcagatgataaaaataccatttaaaagtgcctgaaattatagtataattgattagtttatagctgatctttttctaagacttgtttaaatgatgatttgtaccctggattcccagtttccaccatttcagacttccaaactttatttgtaattcacctaatcagtctggttctgtctgctcccagaatgggtgaatgttgtgaagatagcatctgagatgtgtgagctctaggtcagcagttcccaacctttttggcaccagggaccgtttttgtggaagacaatttttccacggattgggggtgaggggggctgtttcagaatgaaactgttccacctcagatcatcaggcattagttagattctcataaggagcacacagcctagatccctcttcacgatagggttcgctgctgattaggaatctaatgccgctgccgatctgacaggaggcagagctcaggcagtaatgctcgcttgcccactgttcatctcctgctgtgcagcccatttcctaactggccacaaaccaatagtggtccgtggcctggggattgggcgcccctgctcttggggatccctggtagcagggaagaaacagaggatgaggcagaatgatcttgcagccttggtggaggctcaggagctctccaagagcttgtgtggtcctaagaatacaatgttgctggtctttccttttgtctctttgatgtgtgaatactgtcatacaatcattgcattaattaccattgattgaataataaagcggctctccaacctttctggttcaaggtttaagtaaatgaaaattcaattcattaacaattgctagcagacttttaggaactttacgaagagaaattagtgttttaattagggaaagattacaataatattgggcattctcaaacacagttcagcagagatagtaaactcacagattgggaaataaatgtttaggaagacaataacttcttttcgtaccactatggtgaatgagattttattttgctagcttttaaactccaaattgcctatagatgcaatggtttatttcagaaaggagaggaacttggggttctaaggcaaggtggagttttggaaactattagtgcatatttttaaatgtcctttgaaatagttttgatgacagtgacaaaagggggaacaagcatgttaaagtcatttggctactcttgaaatcaagactgtgaagaaaaccttttctagctgtaaatcacatgcttgtcctacattctttaaagcattttacacaaatgactttaacagttttaggggtcatgcctggggttaagagactatttgcatggtatacgttttggtgattaaaaagcaatactttattgagatggtagcacctctgttcacactctgtactgtgaaacattttatttttacctaatgaggaaggattgttccctaagtcaatgttgtaccaagtgtatacttgttgattttatgttgcatgggtgtggaatattaaaaagctttactacttgtaatagtaacaaaaaaaaatttaaaaagcaaccaaaactatctataaaattataaaaagcattgtaaagaataatgataactagtaacattttgatgagtgattattgtgccatgcactgctctaagcgcttttgcgtgtaatgaatttcatctttaaacctgaccatatgaagtaagaattgttattctcacttatgactattaggaagtaaggttcagaaaggctaagtgaattgttcaaggtcacgcaaccagtgtgaatagtgagctggggaataaaaccaggcagatcacactcttaacatctgctccattgagctgtgtacatcagcccttgaatttcacagatactgctcaggatggggcagacatcattgtttatgatttatttttaatgagtcaattcaaatacaaatattaagtaaatacacaactctctcgttggctgtgtcaaaaatgctgaggctgacaagaaaaatggatttggaaaccaaagccttcagcgattggtggatgtattcgtttaaattatacttaagaattaaatggggtcatgcaatgatcgatttttatgccattctcttcttttgctttaaattattgccaatgtgttagcatgtgagagactgctgtgtttactttttacagttacagagatgaccagatagttgagtgatttggtatattatccatgaatttggattgaacggttggcatttggaatgttagataaatagtatacaaattttcttccctgctcctgttttttttcctatttcacagacttgttcatatgctcaccagtgtccctgtccctttccccctgctgagtcctctcctgtgaagtggtcataacgctggttgtactgtgaagtgaaggatgcattgtgtgcacgtttaaatgcagcactggatggcaggatctgccttttaccaaataaagtgttgtatttctcttggtttttgttccagctgagcaattttcattgccgacagcacaacatacattaggataaagcaaataaacaatgcaaggcacttggagccaggaagtcgcatctcagactagaaacacatagttttctattgacatttgggaggtgggctgctaaataggcgagccagccaccaaatagaaaaccagtggccatgaggttcttgcacttctagggaagccatttatttaatcgttagatctttgaaaggtgtctgaagttgattttgatgtaacaacagccagtttctttgtaattaaatattaactcaaaactatgtcttgggtaactgttaacctttgccatttgttgtttgccttagacatgtaattaacattcattgaatttaatttgttgttgttcacgtcttttattaactcatacacaattacttgtcttctgtttttaaaaacttttttgggaagacagggtcttgctctgtgcgcaggctggagtatggtggcttgatcttgactcactgcagcctcgacctcctgggctcaagccatcctcccacctgagccttccaagtagctaggaccacaggcgcgcaccaccatgcctagctaattttttattttttgtagagatgggatctcgctatgttgcccaggctggtctcaaactcctgggctcaagtgagccacagtgctgagccttgtcttctggtttgttgaagcagtaagtcagacaatatttgccacaataatgtctgtcaattgtttgtggctggccataaaaactccagcatcacattcatctgaaggacactgctaatgaaggccactcattttgctgttgtcatccaccttattgtatctcaggacatccagcttaatctttttctattatgtttattcttcttgggagtggtatgactacttctatgaagtcccaacacaagatgaagagcggactccttttgaatgtgtagttagagtatgttcatccttcagttgcttgccagcaaagatcagtctctgttgatcaggagaaattccttctttattctggatcttggcctttggattttctgttgtgtccaagggttcaaccttgagagtggtgctcttcctgtaaggacttttatgaaaatctgcctgttgcttgtggttccatcccagatggtggatcagaaaactgaatttcctattttgaaacaaatttcttgttaatttaatactttactttgaaataatccatgtaaatttggcatacatatttttaatagttccttattttaaaatatgatctagacctggcacggtggctcacagctgtaatcccagcactttgggaggccaaggcaggcgggtcttgaggtcaggagttcaagaccagcctggccaacacagtgaaacccgtctctactaaaaatacaaaaattagctgggcgtggtggcgggcacctgtaattccagctactcggggggctgaggcaggataatcgcttgaacctgggaggcagaggttgcagtgagccgagatcgcgccattatactccagccttggtgacaagtgcgaaactctgtctcaaaaaaaaaaaaaaaaaatgtattctttccccctgccttattcagttggtttggaataatttaaggatttcttctatttcaaattatggcatattacagtaatttattaaaaataatctaactgaaaatcataaatgcaaagtctataggagctttctaaaccagaataaaaaataattttataattgatttgtttaaatattgattaattatgcattcttttaaaggccaaataaaaagaaagaaactttttgccccactctgttacactactactaactgagcaatcttggtttatggaacttgaggttttgggaatcattaaatatttataaagatacttatagttttgggttttttgtttgttttctttgagttgtatagctggagaattccttttcattcatggtttcaggtttagctttaaggcaatatataccaacttttgaagagcaaattgtcaaagtcattaattatcttcagtttggatagtacattgaaaacattaattattttgaataatgtatgtttcttcagctattaacatctgactcgtctgttttaggacctgctgaagttcccatgatgtcacccaatggatccattcctcccattcatgtgcctccaggttatatctcacaggtaatccatttgatggacttctctactcactatggacactgtcgttgctccaacagaatatatgttgaggcttcaaagccatattccaggagttaatttgggtaccgtagtgctaggtttgccatcattttgtggcaccacatggcgtttcttgtgtcttgccacttgacgtaccagagaaccagagaaaaggagacacagaaggcctactagactgtcctctgccaagtggggtttttatatttgattgtttggttgtgatttctttatggagtctcctgcttcagacatttccttccacctgtaatacaactttctggaagaaaattcatagatgtagttagttaacatattaaaggagacatagctcacataaacagggcctaccttctgttacagaaggaaaaaaatggagttcaattgctccacaatgtggcaaaagctaggcttggtgagttattgagtatgatgtgagaacttggctgtttgcacttaaatttctctgagctttggttttctaagtaaaatgatggtaatagcaatctcagagatctgtgggaagggtagaaaagctttaaaggatgaagttatgttcctgtacgtgaataaagcataaaatgttctgcatggctggaacattgtggacatctgtatatactttagtttttgtcctagcctcagcacaatatgcaaatcttctgtttctgcatagctacctttccaaatacctaacaaactgtttttctgtctttctgccttttttgttcttcctacttaccataaaaggaaaaatatttaccattttactatccagagatgataatcactctgctaacatgtttttgattatatccttccagatggatttttcttttctctactctttctctgtctctcagcctctgcttttaaagtggtttaaaatatgtaattttcagtttttaatgattctgctagggcgaaaaattggcagctacataggaaagttgctgaagcggaggcaggaatcaaagatttatccttctctgatataaaaacttacccattttttcaagtgtaaggcatattgcagccactataatttcatttttttccatccttttttttatgtgagccaattggactttatttatttcttactgagttacttacttacttacttacttacatagccagattgctggccagttttcctgctgttgcaaataaatgacttactttacacaagtctttgtaagtaagaatcactggagggagaaaggggtgtagaacaggctcttccagcagggacaccagatgatggatcacattcacatcagccgtcagttaacagaaaagaacaaggaatgtagaattccattatgtctcctgctcatgtattttgaggaagcatttcattccattgaatagagtacagttctcaccattgtgacgcaaaaataacacctccttttatgctaaaggtccatttaagaaataccagttaaaaattgaacatttctaacggagagaagcttcagtgtgctttttcttactagtattattgctgtgattacattaaatgcaaaaatatttattgcatgtactaggaaaagtggagaatttttgacttggatatagttcggattctggaaaacttctgtagaaaatccaaatagagtaaaagtagagctgtacactcgcttgtatgaaactgatgatggaagcatgttgatgctctttcccggctgacaggtatggcagaatatgctagacaatattggaagaatagttaaaatggaataatttgaattgaaaaagggaaagaagcagtctgtaaggcatgtgaatgactaacttcatttcaattgggctccttgaccagaagatgggtgcaaagttaaatgaccttccgtgatagtattatgtcttttatgacacgttacagtagagtatctgaaaaagattgttaatatgaagaaaatagaattgagaagccaacaggatgtgtacacaacatcttctttaacgctggcagtacacacacttcaatgaaatgaggaaggccgaaccaaatataaaatgtcttagttgtcttgttatcaccaagagataggagcaagatacattgttgtcatgcagttgtagaaagaaagaaacacacacacacacacacacacacacacacacacacacacacacacacacacaatctcctgcagcaggctggacatatgtgagaagtgctcagtactaatctgtccctctgctagttagttctgtacagttatccccacagtcctcttcctaaagtagacattactttcttgttcaggtctagagttggttgccttcgcatgtagttaaagttctgtagcatggtgtataatatccataacactcaaccctgcttacctctcaagaggcacctttacctgtcaccccacagtctatgtgttaaatttctgttccctagataccttgggcctctttctaaatacacactttcatgtccattatttccccctgtctggaatactctagagcctttcattgacaattcacttgttctttttggtgcccctcctcaatgtgacccttttagaaccttcatcacagaaatagttgttctgttttttcagcatctgtgattctttccctccctgtcatagaataaaatgtgtatttatagtcatcaccaagaactcatattgcctcatggggattgtatctcagcatctagaatactgcgtggcacaaagtaggtacttgctaaatgtttctaaatataaatgattgtccaagcttaagtaagtacaggagagattcatatatattcttaaatgatttgcatgtttaaagagaataatataatgctcaatagatggaaaataacaatgagactgatctatacctgcaaagaatgaaatgttctgaatgtgtatttaaaagagagaggaacaccaagacagttcactggagaaaagaataatcttttcaataaatggtgctggaaaagctggatatccacatgcaaaaagagtgaagttgaaccactacctcacatcatatgcaaaaattaactcaaaatggactataaacataaatctaggaactaaaactataaaacttgagatacaaaattttataaccttggattaggtaatggatttgtatatgtaacaccgaaagcatgagcaacaagagaaaaaaatagataaatttgactttaaacaaatgaaaaatttttgtgcctcaaaggacaccattaaaaagtggaaagaggcctgggaccgtggctcacgcctgtaatcccaacactttgggaggccgaggcaggtggatcatttgaggtctgaagttcgagaccagcctgaccaacatgatgaaaccttatctttactaaaaatacaaaaaaaaaaaaaaaattagccaagtgtggtggcacatgcccgtagtcccagctactcaggaggctgaggcaggggaatcacttgaacccaggaggcggaggttgcagtgaactgagatcgtgccactgcactccagcctgggtgacagagtgagactctgtctcaaaaaaaaaaaaagaacaacaacaacaaaaattaaaagaaaattcacaaaatgggagaaaatatgtacaaacaatatgtttcagaaaggacttgaatctggaacgtataaaaaacttacaagtcaagaataaaaagaaatttaaaaatgggcaaaggacctgaatagacatttctctaaagaagatatacaaatggccagttagagcatgaaaagatgctcaatatcattagccatcagagaaatgtaaatcaaaaccacactgcaataccttaatgtgctaggatttctatagtcaaaaagacagtaacaagtattggcaaggttgtaggaaaagtggaatacactgtatgtgttaatgtaaaatagtacatctgctttggaaaacaatctggcagttcttcagatggttgaatagggagttgcatatgacccaacaattgcacccctaggtatatacctgagaaatgaaaacatatgaccacacaaacacttgtacaggaatgttcataggagcattattcataatagccccaaagtggaaacaacccaaatgcccatcaacttatgaataggtaaatgtaatataatatcttcacacaatggactattattcagccatagtgaggaataaagaactgatacatgctaaactatggataaaccttgaaaacagtatgctaagtgaaagaagccagatataaaagccacatattgtatcattccacttatataaaatgtctacaataggcaaattcatggagactgaaataaatcaatggttgccaggagttggggggaaggagttaatggggtatgctgtttctttgcggagacgaaaatgttctggaagtagatagtggtagtggttacttaactgtgacactaaaacctactaaattggacactgtgaccggatgaattttatgttatataaactaaatctcaataaagctagtacaaaagaaggggcaaggggaagacagtgacacgtcccagttatgaattgggaaacaatggggcagctgggaaaatggccccactttggagttattggtggtggtgatggtgatggtaactactatgaatgttgtgcactgtgctaaatggtttatttttatgtctagttttcactgtcctgtctttacatatgaggatgctgacgccccggttggaaccaggattgcagcccatgcatttctgattacactgacctctttcccattatgatacaatctcacagtccgtggcagagccttgtcctgatgatttttattgctttctggcagtgtgagtgtgggtgtgtgttgtgcctacttatgcatctccatttctaaaacaccaactgcttgtgcattgtatggtctttatttaccgtttttttttttttttttttgagatggagtcttgctctgacgcccaggctggtgtgcagtggcatgatcttggctcactgcaacctctgcctcctgggttcaagcaattctcgtgcctcagcctcccaaggaggtgggattacaggcgcgcatcaccatgcctggctaatttttatatttttagcggagatggggtttcataatgttggtcaggctggtctcaaactcctgacttcaagtgattcacctgcctcagcctcccaaagtgctgggattacaggtgtgagccaccacaccctgccagtatggtctttaattgtaagaaaattgaagagggaggcaagtaaatcaagattttatggtaataactctaatctgattgaatagagaagttcttgattatagcagatttgttgtataattaaatagccgaaagtcctttaaagataaattaataaaattggtcaaatctgacaaaatacaaatgtcagtaataagcagataataaactcctgaagtttaacagacagctgtggaggtgcaatcaacagcacgagctttgttttcttaggttgagaagggctgaattggtggaccttacagataactgtggacttagggtgcaaaaacagtggaatcctgtcatttcagcttggtggtttctctgatatagtaggttgggggatgtggtgtgttttgtgccttattttttagtgggatgagaggtagagggattcttttcaacttgagagaaaatatagacctttttttaaactatgagaaagtggatttaggtaagtgggaatttaatcttatcacagtcatcatctccattatgtaaaagcacttgtgagtgtgattagagttgaaactgaaggagaacatggacgttacctggagaggcctttcttcagattccatcttggctactttctgtgtaactttgataaattatttcaccacatatgtgaacacctacttgacgtggtagaggtaagaattaggagaaatgttatgtgaggtgtggcactcagtaagtagtagctactacaatgaaaaagactgttacaacagttccaatggaagtttggcagagcttgccctcctaaatacatattgaaatcacatggtgtgaaggaaaattttccttccattgtatactggccatggctctctgttttttaacctcaccattaactttctgaataatttatatgtaaaaatttcttaagcagatgctttgagttttattttccatgcttccgtagtaatttatgatacatttgctcaaatgttatagggaaaacttcatattgacccaaggatttaaaaagcatatgaagagaaaaagtgaaacctccaagttaatgttctatcatttgggaaaccactcttctttttccagattaactgttgtaatcccaaaagttagtagtcaaaataaatatttttgttgtgagagcagaaacaacaaaaataccgcattggattattttggggattaattaatgggtcagtacctgttgaaattatatatatttcatttcccttagccagggaaagacaagaaatgtattgaaaaatatatttgaattttggtttggttggtcatttgccaatgatgagtggagagctggccagaaagcagacacctctgtggagaaacagtggggcctgttaggtggaagctgtgcaatactttccccccatttcgcttagccaagccagctgagctatagacattagcctcaactgcttccctttggtaattacagctggggattaaaccactgctttgtttcaccttcaacgttgtgaaaatgataacagaaaggcacatgggggactgccctatgccctgagaaactgagattcagacccatttggtggccaataaggagaattggattctctttcaacactcttggtccttcagaggaactgatttctctataggaagttagggaattgttccatagtgtacattgtgtgcatgggggttggtattgtgttccatggaaaacagcatagtacttagatatttcgtttcagttatcaatggatttgaagcaattttattttttatcttgtggcttattttgtccaaggagcaattacagacagggttggcaatgctaaattaaagaaatgtaccaaggacatcccctcccctcaaagtattgtgcagtttcgtctttctgagccttctccctgttctgcattttctctttgatttctttcctttgtttctgtgatcccggcatcgtgacataatagaacatgggattagtgggaggaaacgagggcccaagcgaggctctacatccaactctctgtgtgattttaggaatattaagtgatttatttgggtgtgtcacttgtttacttgatcattgtctgtcttccttttagcatttaagtccacaaaggcagggaccttgtgtgtcctgttcagtcctgttcatcacttgatctctagttccttgaaaggtacccagcacataataggcatttatcaaaatttggctatctggctggagtgatttttatctcatggagggaagcggagagaggaaagtgtttcaggatctctggggttcttttctaatctaaaattagattattctcctctgttcatattattccttaacagggtatcaaatgagactatacgtaagtttccaaaagcagtcattaccaaagcagtgtggcacacttattgacatttagcattttattgactagaatgctagttttcacctctatacaaaaatgataattgattttcatagtaggattgacacagtatcacatccagaaatgacttcggaatcattagtgttaaatttgccctttctattacattttatttaattgcacaattattataatctatctttctaaactagtaagtcatatttgtcatatgtaataacttttttaagaaaaatacctttttctgacctgttgggtagcaaaactttaccaaggttagatgaattttatatttctacacattctttgaaacccattaggttcacaaaattagaattatataatatggttattttaatctgtgataggtgttacctgaatatcttcagaatgggttcttaattctttattgtaccaaggaacccactgacagactggggaagccttttttaaaggaaaatataaaattcataggtacaaaggagaccagttttttcaaaactggtcaaatttttttaaaaggtgatacggtaagttttgtgctggtttatttgcacatcaataacatctagcatcagatctagtaactacaataattttgaagttgtgattattataaagattaatatttctataacactgtaatatgacatggaaatgtcacattttgttagtaaccaagtcaaaggtactgctaatactactatgatttgctgcctacatttataaatcagggaaatacaaaatttcagttggatgttagtgaataataaagatgtaatttctaactgagatcatggtcccctgaattctgttcatcttattttggggggattagggtctgtgtacctggttaaggctcttgccccttttggtgagtaatagtatgtttgaaacttagaaccatagctctgttactgggaagggtccagactgatttcttgatacctcatgtctaatctcataatctgagtgggatagtacagtagtagaaagagcaggggtcagagtattccaaacatgggctctaccctgtacagctacaagttgagtaaccatgaaaaatattctaacttcagactttgccttcatttctggaaaggtatagctgtatccttccctgcagagattgtctgggctgtctcacaggtgtgaaagtcttgaatggtaacatgttctgtttaaatgtaaggaattattttatgttgatgaatatgccagttgcctgttgggttaagtctggaagaccctgttctgtgtattggcatcactggaataatctatctgtgtttccatggacctgagtgtgcctgagaagctgggctgaaaagatgtgactggccttcccttctgtgatgggtaatggacaggtactgcagatgcccactgctgatagctttattcacatctcagaagcagctcaactgggcacaaataaagccatcaaatgtctacttactgtttgtcacctaacagaaagcctgtcccctaaaatagcatttctgtttaatctgaaataattatttgatccattttagtatcgattgaaactcttgggatggaacttttttcacttgtccagtgttcttatgtgccacacatttgtttgcaggattagatttgatttttgatttttgatttttgaatttggttctttttggtatttaggtcagtaatatacaatcaagtgtgaaagaagtggagtggtatttccagtgagagtatctgggtatgaatcttgtcacccgtttagcccaccttaggttaatttacttaatcatagctgaagattcctcagctagaatttaggactgtgatgctgcttatgttagatcttctgagttttatgcaagtcaaggtctgtgccaagtgttttataaactattaagtgatatacaaattgtaggagttgctgttgtcacttcgattcttatatattaagttaatcaattgctgttttgctttcagcatcagtccccagtgctgtgtttttttggacccctactttgagatgaggcctcgtggttctctgcagtatctggagaagcttagccctctaaccagggaggggttcctctttgcccatgggattctctatctggggacaactctgggctatagtaaagtggagctgtagctagctaactgagggctcatcctggggtctccagttcataagatgtgtctcttgaccttgctggacttccttcttaatttggaaagtctttattacataattcactgaagtagttggatcagagaggtaccacagagatctgtatttgtttccattctcctgtccaaccctcaggggttactgtcattggacagtagcacctggaaagagctaggtgttctggtaaagtactcacagttgatttcatttatatatgacttagctgtgctcctttgccagatttaagacttaaataagtgtgaatagaagcttggctttatttctgagtgtataaaagtgttggcatgtacaaagccagtggaaggattgccgtttttgagagtgtcttcttatactgatcacctctgaaataaagcctgtcggtaagattcatgcccagaaatgctgaagacaagcaccagtaccttcagtaccttcagctgtgattctcctgaacagcaacacttgatttgttaactggagctaacccttctcccctcagtctgtaccttacctattgcctgcagttggtgtgtgggttaaaaattaagcaccagctgggcagtgtgtgccttacaggccggaggattgcttgagcccaggagtattgggctgtatcacactatgctgacagggtggtcgcactaagttcagcattaatggggtgacctcctgagagctggggaccaccaggttgcctaaggaggggtgaattggcccaggtcagaaatgtagcaggtcaaaactcctatgctgatcagtactgggaacatgcccatgaatagccatcacactccagcctgggcaacacagtgagaccctatctcttaaaaaagaaaaataaagcaccaatgggatgggaaatttcagatttctagacataaatgagagtgctcataaaaactctggggactttttgttcatgaattaactgattagcgaaaaccttcattttgatcacctataaaacagacaaaattaggtgtttagacttaatcactggcaagaactgtttgagacagacaattgtagttttcaaggaacttcttctttttcctgattcagaagaggatatctgttatcaagctgtaagtactctgcaggataatctttttttgttattatttaaagggcttttagaaacatcaccagtcacttatttttccttttgaagacaacaataatcatgttctgtggcaaaaggagctggtccgaaacctagaatgataatgaaagtttgcaaatatcaaatattatttcatcactattagccatttacagatgtgaagagaaatgagcttgaaaagtagtttgatgttttcaaccacacttttaatctttagatttgaaaacagaaaaggaagtctggagattagggtaatatattcaattcttccaccattttttaatttttgatttttatttttgagacaggatcttgctctgtcacccaggtggagtgcagtggcatgacctcccttgctcaagtgatcctcccacatcatcctcccaggtagctgggatgacaggaccgtgccagcacacccagcaaatttttgtattttttatagagataaggttttgccacgttgcccagtctggtcttgaactactgggttcaagcagtcgcccgccttggcctcctgaagtacagagattacagtcatgaaccaccacagtcagccctctactgacatttttaagtcaagtagcttaatctataaaataaaatgtttgaccacttagtactataaaactcttttgttgccctagaacattcctttatcctaatttttctttcttcttatggtacttgggtgatggtggtgagagttggcagcacaagggggattggctagggtgggtacagaccttacgtttcaaatctctaccctacctgaagaacaagcttgcctttccttttttatattatctaccatattagaaaatgcagagggaagagttagtgcaaattgggaaagtgagtaccgatgcatttgtactcctgattggtgagcaaaataaaactgctcagcctcctataggattaaagtagaacttacactggagatgtttgatctttctgtataaatgtttgtgataaaatcatgcttatttaaaataagaagatcaggaatgatagatataaaattaactggattcagattttctgagattttagaataggatgtcagctatttaccagagttatggagaaaagttttaataatgacgtgctaatattcttggcagataccaaatctaagcagatataattaatttatttttttttttttattttggcttgctttcttattcatttactcatttaaccaacatttactgaaagtcttctgtgtgcccagttgcttctgagggacttgcagctgggtgggagagacagatgtgtagtccaagctacaggatagaggtgctgagtggagaggggagaggtgagcaccagcctgcttgggagaatcctggattctgcctacccatcccctgagtccatgcagcttgtttatattgaccagccttgttcttctctttgttcattgttcgcatgctcacttttatctgagacatcttctcttcctggaatgacctgggatcccactttaggcatgttggcagcaataagaaattcagcctgagcctgactttcacagactcatttggtcccagttttctgtgtccaggcaactcacccagtgttttctgccaccctggcaaactggctgccagcacatcacactacgtatgtttgtgggttcatatgtgtccacgtgcagaatctgcccatttcctggatcatcctgggccatctggggaagcctttttaattttttcttttgcctcctgcctttcaagcttctcttttgattcttgtggcttgtagtccaacaagagtagaaggaaagagcttcaggaagtgaggagtttattaaaattcctttgaagcatttcaattcagtaagaggaactatcttttctgttagctaagacaaaaaaaaaaaaaaagaaaaaaagcaaataacaacaaccctcaaaaaaatataaatgtttttaggagatccattttagttcttttttttttttttttttttttttttttttgggatggagtcttactctgtcacccaggctggaatgcagtgacgcgatcttggctcactgcaagctccgcctcctgggttcacaccatcctcctgcctcagcctcccgagcagctgggactacaggctcccgccaccatgcctggctaatatttttttgtatttttagtagagatggggtttcaccgtgttagccaggatggtcttgatctcctgaccttgtgtcctgcccacctcggcctcccagagtgctgggattacaggcgtgagccaccgcgctcagccccattttagttcttatacacaaaattgatcctcctttacccagttccgtgtccttgagtgtattaccttcacttccctaagcatcattcttatttctaaaatggggataactgtaactgtatgtgcctcacaggattgttggcaggatttagtggagtggtaacattaatagtagtaattgatgagtaagattttgttacattatgtatcaggtactgttctaagaacttgaactctacctaactcctttctggtagagggtattaaaagcatagcagtattcaataagtattagttgtatcctgaatccttttcacatctcttaataactcaggtatcctaattctcaacagttgattgtttacctatttacttctcaatatacagcttctgtataattttctacataatgaaaactttgatgtacacaccagtatgaaaaatcttggttctgcagcataccagttgcacaatttaatcatgctgtgccttggttttcttcatctaaagcagggatgccaatacctaattctcaagtgttaaggaagttgaatgagatggcccatgtcaagcagctgacagaccacaggcactgactgatgtccttttccatctcccatcctgtgctgctcctgggaaccctccatcttgctgttatccccaggctgtttcattttgttttgatgattctcttggtcatatttataagaacactagtataagacaaagattctctccgttgcacattttgtgccttattctctagccacttatgcttgtttctaggccacaggatagcaagaatactaggcacgtagaagattttttgtaaacgtgtactaagctggataaaacagacatgataaagaatcagcctggcttctattagccatcaggccagatttcttcattagcctgagcaagatggctcagtgtttgttcacagaggctaaacgtatcactttttaaaagagagtttttgtttgtttgttttaaatcaggcaaggcttgtagaacttaaggtagaagaaagtgctggattgagcctttgtaatctaagggggtgtattagtttagtagggctaccataacagaataccacagactggatagtttacacaagagaaatttattttcttacaattctagaggttggaagtccaagatcaaggtgtcagcaggattagttggtttcttctaaggcttctcaccttggcttgtaaatggccattgtattttccattttcaagctgctaataaagacattcacaagattgggcaatttacataggaaaaaggtttaatcagacttacagttccacatggcttgggatgcctcacaatcatggtagaaggcaaggaaaagcaagtcacatcttacatggatggcagcaaaaaaaaaaaagagcttgtgcaaggagattcctgtttttcaaaaccatcggatctcatgagacttattcactatcatgagaacagcatgggaaagacctgcccccatgattcagttacctcccactcagtccctcccacaacatgtagaaatgcaagatgagatttggttggggacacagccaaaccatatcattatgtacctggcccctcccaaatctcatgtcctcacatttcaaaacaaatcatgcctttcctacagtccctcaaaatcttaactcatttcagcattaactcaaaagtccacaatccaaagtctcatctgagacaaagcaagtcccttctacctatctgcctataagcctataaaatcaaaagcaagttagttactttctagatacaatgagggtacaggcattgggtaaatacagccattcgaaatgggagaaattggcccaaacaaaggggctacaggccccatacaaatccaaaatccagtgggacagtcaaatcttaaagctccaaaatgatatcctttgactccatgtctcacatctaggtcacactgaggcaagaggtgggttcccatagtcttgggcagctctgcccctgtggctttgcagggtacagcctcactcctgactgctttcacaggctggtattgagtgcagattttccaggcatgtgatgcaagctgttggtggatctaccattctgggatctggaggatggtagccctctaggcagtgccccagtagggactttgtatggtggctctgaccccacatttcccttctgccctaccctagcagaggttctcgatgacagccccactctgcagcaaacttctgcctggacatccaggcatttccatacagcctctgaagtctaggcggaggttcccaaacctcaattcttgacttctgtgcacccgcaggctcaacgccacatggaagctaccatagcttgggacttgcaccctttgaagccacagcctgagctgtaccttggcccctttcagtcatgactggagtggctgggatgcagggcaccaagtccttagattgcacacagcatggggactctgggcctggcccacacaaccattttatcctcctaggcctcagggcctgtgatgagaggggctgccatgaagacctctgacataccctggagacattttccccattgtcttgcggattaacattcagctctttgttacttaagcaaatttctgcagtgggcttgaatttctcctcagaaaatgggattttcttttctattatattgtcaggctgcaaattttccaaagttttatgctccgcttcccttataaaacttaatgcctttaacagcacccaggtcacctcttgaaggctctgctgcttagagatttcttctgccggataccctaaatcatctctttcaagttcaaagtcccacaaatctctagggcagagacagaatgctgccactccctttgctaaaacataagaagaaccacctttgctccacaagttcctcatctctatctgagaccatctcagcctgggccttattgttcatatcattatcagcattttagtcaaagccattcaagtctctagggagttccagactttcccacattttcctgccttcttctgagccctccaaattgctccaacctttgcctgttacccagtttcaaagttgcttccacattttcgggtaacttttcagcaatgtgccactcttcttggaccaatttactgtattagtctgttttcatgctgctgataaagacatacctgagactgggcaatttacaaaggaaagaggtttaattggacttacagtttcatgtgggtgaggaagcctcacaatcatggtggaaggcaaggaggaccaagtcacatcttacatggatggcagcaggcaaaaaaagaggttgtgcagggagactcctgtttttaaaaccatcagatctcgtgacacttaaatcaccatcatgagaacagcacgggaaagacttgccttcatgattcaattacctcccacccactccctcccacaacatgtgggaagtcaagatgagatttgggtggggatacagccaaaccatatcagccatcttcctttggtgtcttcacgtgatgttccctttgtgcatgtgtcttgtaaatctcctcttatatagatactgttggattagagtctacctatatgacctcatttcaccttaattgtctacttaaaatgccctgtttctaaatacagtcacattctgaaggtagtgagcatcagaacgtcaacatttgaatttggggacacataagtcagcccatgataggtgacagtctgagaacccggcataatgatcttttccaaggctctatgcttctctggagaggatatgtgagtgacagttctgttgggtcatagagctggaaaaaatttagatgaagaatatttattctgatttctgaaatcaccacacttctgctttcttaacagcacttactaggacttagtctaatttttctctttatattcttaggctgtgtggatgagtcttactgttgagcacttattttttctcccctttgaatatccagtccttagcacatagtatgtgtcaggaaataatagttgaattgaatacaggtgattcatctgcctctggacattctcacaatttcctacaccacaaaaggaaatgaatttgtcttttccttagtcgtctaccaagaatgaaggcatattttttttgcctcaggtgttttggactgaattctgtctgatgtctaaattcgactacagtaatatatttatttatgagccatctttattaaagaatgttactgccaccgtttccttagttgccaattattttgtgcattgttattgctcctcagattttcttattttgggggagacttaggcataatttccttagatgtagatcaaagctgaattggataactaaaatatgttgcaatttatgttatagaaaaatggtaaaaatattcacatattttttatatttctactatttcagaattaatatttcacctttttttttttttttttttttttttgagtcggcgtctccgtctgtcacccaggctggagtgcagtggtgcgatcttggctcactgcagcctccacctcctgggttcaagcaattcccctgcttcagcctcctgagtagctgggactacaggtccacgctgccacaccctgctaattttttgtatttttagcagagatggggtttcaccatgttggccagactggtcttgaacttctgacctcagacagtccacctgcctcggcctcccaaagtactgggattacaggcgtgagccactgcgcctggccaatatttcacttttttaaaataaatctttttaatgataagacaggcttgggtttgtcaagaacaggtttctaaaagggtttcattatgcatgcacatgtaaataaaaaccttttacaaatcccacagaataagatactttaaaatggagctgtcaagcaatttttatatgtacaggcaatttgtggtttcaaaaagctacttcaaaaaaaacttcaaaaagttagtgctttttgataatttttttttaaaaccactttgttaacaggtccaaagttatatgataaaatgatcaaataaattttttcgttataaatagtcttgtttaaaagtccaaagcgtgcctcttaatatttagtgagagccctgttcttgttctacttcatcagttgtctatgttgctggttgacttttggaagttttacactgaatgaaagaataaagattgtaaacctctagaaaacaagtactttacttctgtggtccttccaggattgaatgaaggttccatgaaagagaaacatctggaatatgccttttttttttcttaatagctagtagagggtgaggagggaaataagacactgtaggataatgcatgtttgtgtcagatcgtaggaaaaaaatcatgatgtatttatactacatgtgctatttatatacatgtgctaccaaacagcatgcagctctatgttttagacaaaatagaagaagctttgatgataattatcaatacatgcatgagaatttccaatgtcatggtttaagcacccacttcacatacacttgtaaattagcttccatgcattcataaatggggttagtgtgattagcttgccaaggcccagaagagattatatttattaaagatcacatgaaaagctgtgtcctaggcatctcactaggaatcttaattttaaataggtaatattatcttatttatgaactattaacacagtagaaacatttattttgatagatttattaatgaatgtaaagatttctgtttttttaacataaggattaatggccgttcattcaatctaaacctattttgtacactgaaatataacataaacattgatagacttgccaatctgtcttaagcactacttttaaaatatgaagctaagtatagttttttgttgttattaagatgttttagacatgattaagtcattttattttgtcctataattaacctcctgaggtataatgagaaatccatttcaatatagaaggtcagttttgtgcggtttttagatttttttttttttgtaaaacaaaacttcctgtcagagtgtgtgcccgatcgtgcatttgattagatcagctggcatggcttcttggcagcctggccctcactgccaggtttactccgtgtccacttccttgcagggccctgacctagaggccatctctcagctgtcccagccctgccaattgtttgaggtccctgaagcctttcctgattctcccatctcacgttatcattctctgtaccctacaactttaccttttcatcatggtatctgttgtgttagttatttctttcattgtgtttcaccaaagttgtttgctcataggagctggtagtgtgacgctggccacagaggcaataaatattggcattgtgctgccttcgttgctctacttggatgaattagaaaacattcagaggagctgggcacggtcgtgcatgcctgtagtcccagctactttggaggctgaggcaggaagatgacttgaggccagttcaaggctgtagtgtatgatgatcacacctgcgtgtagccactgcacttcagcctgggcaacagagtgaaatcccatttctaaaaataaataatgaacaaagaattggaaaaagaatggatagagtgttgattggcttgcttttctcatagcaggttgcttttccaagcatcttctttcacaacactcatcatgaggacatcttgggagcaaaagtgtccatactgatttggggttacttaagtttttctttggtcagaatccctcatttcatccatatcctcagtcctagattaagtaatcttagggcacacttacggcttctgacgttaatgccacctttgtttcctaaagccctgatgatgatggaactgtgcatgttaaagcaggaaaggggaagaatgttgtcagcatatctagaagcctagccctggaaaagtacttaggtggcacagaaagcctctttctggaaaaccactgaactgatagttaaattcaaaagtcactcctagaatcagtttcagcacacattaaattcactcgtcttggatgaagccagtgaaaattttaagacaaaaacaagatttattatcaaatactggtctctccaaaaagttacatgggatcagaatcagatgtcaatgaataatttgtttttgtacgtttttatagttacatgttattacttctagaactcatttgactggttgaactagagaaccagaatacaacatgcatttgtttttttctatggtggaagagaaaagtaaaattaaagtggaagttattaatactatatatattcataggctgctaatatgtactgcgttctttccttttgtgtttttctttaggtgattgaagatagtactggagtccgccgggtggtggtcacaccccagtctcctgagtgttatcccccaagctacccctcagccatgtctccaacccatcatctccctccctatctgactcaccatccacattttattcataactcacacacggcttactacccacctgttaccggacctggagatatgccgcctcagttttttccccagcatcatcttccccacacaatatatggtgagcaaggtgagtagattttcgttggcgtcaggagccgttgaaactgattacagcgtttcaatagttcaaggcggtcctttgtttcttgtgaaataagcatagtagaaaaggatctaggtggtttgtaagactcatggggaattcctagcttcctttgtcctgaatggtgccttggaaaaattactttgtgggtttagttctttttctttctttcagttttcacaaactcggccccaacccccaccttacaagatcaaggagtaaggtagccaccttttattttagaaaagtggcagtgtgacatcgttcccatgtcctgaaagcatgtttgtatgtgagagtggcctgaggtacaactgtggcacatcgtttctttggtatccatatgatctaccagttaaagggaaattgaaaagtgttttgtgccccatttccagtgtttgaagattgtgaagtctcaagaacctttaggtttcctaaaaggctctatgttgtgatgctggcagaactcaaaaatcccctggctgttgatgtggccttcctgaacctgcttttagtttaagagtagccattagtgcagccgcaatttcactgattgttaggcaaatacttacctggatatgaaaagagcctcagagctaccaacattatatctttttaaagttttgaccctggtgttggtttagtctaaaggctttctctatcaaaatggatactaagaaaccagataattgagggtaaaattagactttagcctctaggactttgcaaagtgattttcttctgagtctgactatgaatggaagcattttactgcttcagacatttattatgttggtttagatacattgtagaagaaatgcctgttataccatagaatgtttgagcaagttatcacttttaagaattatatatatataattatataatttctatataattaattatttatttataattatatttttatatatataattattccctgttcatctcacattataacttattcacagaaaaaacttttttgagatgatattttaagtgaaatatatcgttgtaacttagggatagaatttgactgtatgtgtgttttgtttatttttttttgtagtcaaagaaatttgacatgattcaaattaatcaggtgctttcacaatgtcgtataaggggatgatagcaaaacatgaaatcaatactttgatttcatagcagcatcaataacttcctatcaatttgatcttttttccatgcgacacaccaagaaaacatcaagtattggggatatactatgaaaacatttggataaaaactgaaaaaatttagttagctgtaatttttttaatgtattcagtgctttgactcaacatgcattaaataattgagtgtttcttagagctttctggctgtatctgagctctgatgacatgaaaggccttggtgactgactcattgcttgctggtatatgtctgacttgccttattttagcagtctgttagtaggatgccacatggttactgttttgtaaatgctgtcctttgcaattttaggcaagacaacagtatgatttaaatcgtcattagagttaagcaaaattgtagtctcttcattttatggtgtatttgggtctaattccattaaaataacacagagcaataatgtatgcaaataaaaatgccttcattgatttcaaattaaagcagtaaaacaaaatcccttccctttataaataagccattgatatattcttttaccttagttcttagtgtgcatacctaaaagcaatttaaatattaattttctaaactataagagttttaaaagttttcaacatgtctgaaaagattattactgcccatagtgaatatgttaaatctcatgtgtaatacatcgtggtgtttagaacatttactatccttctggtatattttgacatagtttctttggatacacactctctgaataggattatatttgttttgacacgttctctagtgcaaactggttctctcatgaagatttgttttttaacaaaacaactcttgtttatgctttagctatgttaacagtaagaaacagtggagctttactgttgagtaattgagacagcagttttgttaaattatgcagggtaaccatacatttctgttgtgcctgtgacagtcctagtgtaggtctcttgccttgaagaaattattgatattccttccttttcgctctcagaagtgttcagatttggatggtaatttatattgtcactccatagaagaggtgacccttttttcttataaagatgtaaggacccaatctttatgttacgcattgtcatttttactgatacctaaaaataattttgaactgatttaaaaatttaaatttaacataaagttttccccttgagatcataagattgcttgcaggcttctattttcttttgagccactttaaaatgtgcatagtaaagtcaggtgacattctacatttgtcttgccttctattactccaaaagagaagtttgagaccacagcttattatgtttggcaccagatttcagagatggcttttctttatccttatacttcctccttgaacatttcccctgattctgtgagctttgattattttaaatggaaatatgtcatctcattatcttagttaaatttgttcaaatgttggctcttttgtatgccacagaaaactttgactgcaatatacttcccagtagaaatactattctgtctacagggatgagtagacttttaaagtagcttgattctaagtacatgtttaataggggtattttatttgttctgactttttcatgtattgcaactactgaaaacatattgaaaggtaaaaatcaaactcagttataaatgcaactagaatatgagctctttagggataacaaccttgtcttcagtattctctgtaatataggaatttttctgaacacacagtgtagtttttaatgattgattattccttgattggttagaaacaaatgggaatgctttaaatgtatatcatgtatatggcattttcttttttctttttctttttgagacagagtcttgctctgtcgctcaggctggagtgcagtgatgcaatctcagttcactgcaacctccgcctccagggttcaagcgattctcctgcctcagcctcctggatagctgggattataggcgcctaccaccacgcctggctaattttttgtatttttagtagggatggggtttcaccatgttgcccaggctagtttcgaactcccaagctcagacagtccgcccacctcggcctcccaaagcgtgagccactgtgcccagcagtattttcttaaaaaatatttattagactctatttagtaatactttagacttcctttatactttagacttcttcaggagccagatcatttgaccatttaataatttattattgaaaatgtaaactgagtttgggtttatcataatcatccattttagaaattataccattttatggaatgtcaacctacatcacccgagaagaccagtacagcaagcctccgcacaaaaaactgaaagaccgccagatcgatcgccagaaccgcctcaacagccctccttcttctatctacaaaagcagctgcacaacagtatacaatggctatgggaagggccatagtggtggaagtggcggaggcggcagcggtagtggtcccggaattaagaaaacagagcgacgagcaagaagcagcccaaagtcgaatgattcagacttgcaaggtaatactcaagatgtttgccatagagtgaattatcaagacagagacatctcaaatgatgtttccacatcttttacatgagaatattatttcatggtggttggttgttctgctaagaatatttgagtagaccttctttgatctatttcttggtaaggaaataatattgcattgtttattttttattaatacttcatggcagaaatactacattttggtcacagatgccatgcaactttgcacttaataacaaatatttgaaaatcttttcatgttagcctacttctgttgtttcactctctgaatagacagatgtggaagaaatccaaagataatttttctaaaagtgtaggctagtttaaatctcaaaataattatacctcataaaccatacgtaattacttcctttctgtaatgaaatctatcattgaatcacagaaatatgtttctgtttagttttggcatcagttattgtctcataccaccttttgcctgtgaattaagtgttcagaaactaagaataagatggaagaatgagggccaccacatataggtagagaaacatcaactcagaatggcatctgtctttttgtagatgaatctcttgggtagatcagttcatttggaggaaggtttatgtgtttaaatgaagttttggaggtagtttagagagaacctattttgatgccacataaggaaaaacagtggctatttctataggcatagggaagaatgacttaagtgaggcaaaaaaggtagcatttggataaggtaggtgagtttatagatataaatgactggaaaacaaagacttgaacaacttttaaacataagatcaattatttcaagtagattccctttttcattcacaatcacattctcacagacacagtcccagtttctacctgactgagatgcagtaaggaatctgattataacactcattgattataacactcattgaatttatggattccttactgcatctcattcaggtagaaaaagggactgtgtctgtgagaatgtgattgtgaatgaaaaagatggaatatgtgtatttttgagtgtctatggaagagcttctgacaagagagaggaagattaggtaaaatgaaatatcgccgtcggcatttccccctacgttatttgggtgagtgaatttcagcctgagagaggaatagtaagatacagtgaaatgtgaatagatcatgtgttcttttaatttgaattatgtattcttttctctattttccaaactctgcaattatcacgttattcttataactcttaaacaaaacataaatcaatatcatacaaaagaaagcaaagattcaagagacttttacacaactcttaagggaagatgctgggtctcatataaaataatttttagtcaaatgatactgtaatttctaagtttgaaattagtttattagcaatgttacaatttaaccatgactatacaagaactcatactaaaaaaaattatgaatagattttcctgaagagaatttttatccgaagaaaaacgagagagaatgtataaattgtccagagagcttacgaggtttgaagtactttgattacttgactcattctttaataattttcaccttgccttgcaccaaaactgatttaagggaaatgacttagacacaaagaagcagataaaataaatgtaagcattaaggagccgaaagatgataagggaaggaaaatattaataagatgaagcagggttccagtagcattgcttgatgtgagccatatattttgttttcagcctcctggttgtcacagcaaaaaggcaaacgtgaatcacatagtgtagacgaagaataaaacacttcttgttcatggggtccatcaagtggctcacaatgtttcagttgtgtctgcctcaaaatgtggttgttggctcctaggatcccaaaaggctttttccttctttctcatccttacagtgtatctcctgctggagtttactgcggctgacatctaaatctgtgccccggaaacagacttcttaactgattcttaagtttccagtgccacctgattaatctaaaactatacttaatactagtatgataaacctaataggttcatatgtggtttgcacaagagtagaatatatacctaaccataacatgtgacttgtgtgtgttttttgtttttgttttttttatgtaatgttttacttaggttaagttgttctcatggccagaagagagaaatctttttactttttttttttgagatggagtcttgccctgtcacgcaggctggagtgcagtggtgtgatctcagctcactgcaacctccgcctcccaggttcaaaccattctcctgcctcactctcctgagtagctggaattacaggcatgtgccaccacaccctgctaatttttgtatttttggtagagatggggttttgccatgttggccagggtggtctcaaactcatgacctcaggtgatctgcccacctcggcctccttctttttactttataattcctttgcctttgagttaatttgcttgaataatttaactttttatcacttacaaaaaacaaatctttaaaaaaagactaagtttgtgcctggtcctgtggtaaaactaagcacatgtaaaagaagcaaacaactcatgttaatataaatacatgtattaaaaagatgcggataccttaatttctctcttgaggtctagttcactcagttaactatgcttcagaaactttaaagcaatagagattcatggactccattttagacctactaaatcagaatcttcataccacttttgacttcatgtttttttttttaatcaaacctccattggggataatgtataatcagccaagatagaaaattattatactatcatagtaataaggatggttaaccaagttgtacacagtatggaatagggactgtatctgttttattcatcattctctccctccttctagtacctgacacatagtaggtactcagtatatattgttaaatgagtcctgttttcttaattgccttgttttccagagtaagccttctttttgaacacacaaagctattgtaccatttccttttcctggaacaaagtgttgcattgctcaaggaaactgctctgtggctagcctcccctttcatttactgttaccttcaggaaaacaggcatgacagaggcccatagtacactctgagaaatatgggatctctgtcttcttgcactcccttggagctaatggtgtgatgtgagccgagaacagttggggctttagtattagacatatagtacttggcttagaattgggctttgttacttactatttccttttagttttccctgaatttccatgttcactttgtaaaatgggcattttaatttccattattaaatattaaaaatacccttgctttagttcttaacactttaatataatggtaacccttatgacttgaatattcttgtctctctcatctttaggactcctgttattataggatcacctctcatctgagatagctgcctctcaaagtaggcatctctctactctccatctggcagccttttcccttcccttcatgctccattcccctcaccccagctccctacatttcttctttaagccagaagtggcttcctttgcttaaacccgtcttatattttgaaagctaaaccctgcattcctggaccactgtctctgaaagttgcttccaggctcttttttttcttttgagacggaatttcactcttgttgcccaggccggagtgcaatggcgtgacctcagctcactgcaacctctgcctcccaggttcaagcgattcttctgcctcagcctcccgagtagctaggattacaggcgcacaccaccatgcttggctaactttttgcatttttagtagagatggcgtttcaccatgttggccaggcttgttttgaactcctgacctcaggtgattcacccacctcggcctcccaaagtgctgggatgacaagcgtgagccactgcgtctggcaaatttttttgtattcttagtaaaggcggggttttgccatgttggccaggctggccttgactcctggtctccaactcctggcctcagcctcccaaagtgttgggattacaggcgtgagccactgtgcctggacacttccaggctcttttaagaaaggttgccactgggtagaaacgtacagataccttggggtcctctctggtggaattggtaccagatctcacacatctcctcgtcacctcgtcctagggcacttccagctctgagtgagaaagaactctggtgcacagcctcttgggacttcctttctcatggtccctggtgtctcctcatacgtttcttaggattttctttgctccctctgaaccttaagagactgcccagaagggccaccttatggtttaagatgtgtgattattcattttcctctccagtgcatcctctcttgtgactacagttaaatagatctcaacattttaattccttccttgagaacctttgtggtgctccccactgtctagagaataaagtctaaactgcatgatatgacacatactcacctcttgtggcccttcacatttccccaccagacatgcggtgttctgccccattttgtgaatatgcctcattccccttttttggcctgtccttccagttcctctgcctagcaaactccaactcaggccttcaagagccagctcagttatcacctcctctgtgaagcctgcctgtctctccaacatattatgatggcagataagttaagggaaaatatttcaagagtttttgccttccttttctcttcctctcccagcatttcattttagaacagtgcttgggcatccagtccacagatgttcaaggacaggaatggaaaaatttgttcttgtgtacggagtattatgcaagagctgggccttgagcctgttctgtggccaaaacccagttaaaatagtcacattgcctttcactgcagaagctaaagaagtttctgttgctcttcattgagtgagaaggaagcttcatttcttccattttattcttgataaaaaaaccaaagcacacaatattttaaggaagttattgagtgggatacagtgagtcaggatccagttttctaactgaaatccttcaattttcagccagttatagcccctcagaaagcagttaggttatctgctaatattgttatagaaataattaggtgaatttagagtaaaaaacaaaagctttgatgaggatccactgtttaattttaaaagacctaagtagtctcaataatatgtatgtgtgtgtgtttgtgtgtatatgtgggcagatggtgaagggagaggaaatcaagagtgtaaagtcacaatttccaaacttttttttttttttgagacagaatctggctctgtcgcccaggctggagtgcggtggcgcaatttcggctcactgagacctccacctcccaggttataagcaattctcctgggattacaggcacctgccaccatgcctggctaatttttgtatttttagtggagatggggtttcgccatgatggccaggctggtcttgaactcctgacctcaggtgatccacccacttcagccttccaaagtgctgggattacaggtgtgagccactgcgcctggcctccaaacacttttttatgtataaaaatttgctgtgtgcagttgacattgttgactttcactttgttcctggggcttaccctaagagtgaggatgtctttttcatatatgacttttacattttaaaaacagaatggaattgtaagattttaaataatcggcgttctggactgtgtgacatagaacatgtcatttcactaagccgtggtttccctttcagtaaaatgaacaggtgagttacagtcagtgattttcaaaatcttatcaatgagcacattgcctctcttttcaggcaatcttgtgtggattaccagttttaaatacagtatcccttcacccctaccacatcacacgcattcatacacacacacacacacacacacacacacacacacacacacgcactctgaaagcagacagcactagaactccagtggtttgagtggaggacctgggtccttgtcaccctccacaaggctttcccagggatccagccctcacctgggtcctggctactcatgggctcagaccagcagtatcagtaccatctagaagcttgtgagacatgtacccttatgacctgccccagacctactgaatacaggctgtgtaggtggggcccaccaatctatgtttcatcaggcactccaggtaataataagccacagtagcatttgagaactgctggctctttgagtgccaagcaatttttaaccaagattttaaatggcaggggtgggaaagcggcgggtgggaggcattcagttggaacacttggtttaagttgaagtatgttccttgtactatctgtatcatgataaatatatactagtgatggaagagttccttttgtgtgactaacatataggtagcagcttatgtgaactcttctagaagtcatactgccatatgggaaaaattgggacaaagtggcaagaattccaaatacggaagaaaatgaacgtacagcatactcttggcatttgacctttggaattgttaacaatccaaagactcagttgcattttagatcacattccacgacatagactcacaggttctggttatgataccgaaagccagtgatgagggcattattcttgtgcatttgtctttcagagttcgcagattgctttctgactccagcagtgttccttattaccggttctttgtattctaattctttctcaggtggtcctccctggcattttttctcttactattcttatattttgtgatcattgctcagaaaccagaatcagactacagctttacttcccccaaagcagcaagaaagtgtattcacaataacagtaattattcataatgagaagtcacagcgcaccaaggtttgggatggcgttttttccctctgggggtctgagactgtggatatttttgggtccttggagtctatccttttgctgaatggcttgggctctgggagggcatagcagcatccacctgcgcagggctgacagtggtttcctttgtctggaatgacgtgcttaatgttaataaggtctggaatgttgggagtcaagacagattttcttttggaatctctttggtcttggctccctgtaacagataatgcttgtgcttttctgttttctgattaaagtaggatatttagtagggcttttgcacttcacaagtggcagatttcctctttctcttgtaagctttttctgtcttgtgagcacatatcctaggcatgctcagacgaggtgttttggaaggctggagttggcagggttcttcttttcccccagagtatctgcttcccttactgcatttgaacactgtactgtttctagatacatttttaatattgctttatctctcaagtctataggtgatgatgaatcctgtgttttttcacctgtctatagctgcatataaattctgagtattgcaaaaatatcaagaaaacatgagaaaagttaaaagtgagctcaggtcagtggaattcatccatctggctgccaattacagtctgaaaagtaaaaatagtccaaacaagcccaaataacttttattttttcaaaggacagtggggacccctggattagaatgcaagagacatgaggcattcttcttggcaggaaactggacaattaacatcgccacttccatttcaagcgtaggctgccagatctctctgcttagttatagaggcctctgagtgactctagttaggggccgagcgcacttgaacgccttgcaactgtctatgtgtgggatggagatagttctggggacagaagcctgtttcataaggagcatgctgctcattaacatgcgctttctgacttgggccttatcctgcaggcccaaggctggagaaatcaaactgtgaataactacttttctgtaagacccctttatgatgatttttttccctcttactgggatgttgattttactagtgcaaaggcaaatttacagctcaacaaagaggaaaccatggtggcccaaattgttaattagtagagtatataattgtctttattaagttacatcacttatcctatcttttgccttttgccctttccccctcgtatttttgttgcaatctggaatgttttaaagatgtttactacatgattctttcaacaggcaaaatgagatatttttgtcatgtcaagttaagaagtcttaacccattaaatcatacttgaagcttcacatttttcacttgcatataaagacaaaaagcatgcaaaaataattcgttgagttttcttttgaaatgaatgttcaccagaagtttgaggtcagaattttgattagtttttaccatatgtagtactgaactctgtaaacccatgttattttctctgcctttttgctttcttgggaactgatcatgacagcatttagatgacatcagaacccatgttggtaaaataaatgtcatcccaaagaaccctttaaacagcaggtataagtgatgatatggtttgtttctggtatatttgtaaccttcaattttattgatttgaaacttctatatgttatttctttcatttagctaagttgaattctgaatttaactgggttagagatcgtcatcacaaaagtgccatactcagaagcatatttaaaatatgtactagttgggaccttgcagatcttggtttagtctcaattcagccacttgggaactatgtgcccttgggcatgatagttcatctttcaaggcttcatttctttcttgtatgtagaaaataggggtaattaatggcatctctttcagaggactatcatcagctcttagtacaatttcagacactaagtgctttaaaaatgtagtggtattggtgaagaaagaccatgagattttttccttgtgagaactgctttctgtgggccattttattataacctcagcttgtgagcatgcccatcagaatgctgttgggcaaggcgtcctgcaggctgggtcagtgttaagtaatagtgaatgccaaggacttgagataggggagagttcagaggggcatccactccccaaaaaaggttctcggactattgccaacccacaaacaacctgctgaattctgggcaagaataaaatgcagtcctctctccgtgctttttccctgtcacctctctggttgaattctctgtgtgagcccacagaatggggtctgacaggcctgcttgattctgtttgaacccactcagcaaattaaccactctaagttactttgctaaaagggggagatttcaggggacattagctggaggcgatgggcaaacaacaacttctctatatttatttttctcccacccacattccttgcattagggcaattagttaagctagatggataaactaactgggtaacccactaaatttccaagtctttcacaacctttccttacacctggcaacttgtacaccatgtcttccgcattctgtgggctgcatagacctgccctgctacattgcggaaggggtcagcactaggtttaagtagatcatgggggtggcgaggcatcatggaggctgactaccaggtatgtcgaggtggaaaccatttctgttaataccttatctgaaagagtctcagcatttgtgatggaattttggcaaatttcctgctgctatgtcaacatcgattttgtcattgcttctccttctgtggaatggagctctaggatctttacataaactgcagtgtcaagaggcagggtgttgaacttctggttttgtatgatcagtattgtaatgtgataattatagtctatactacaaatatgttcattattcttcatgctttctgccatggtcagctgtggcttttattttaaatttaatttgctcaaccagacacacagtgtagcagacgctattaccgtatttcagtttttggtgctgtagtgagactttgaaattctaggaattgagtagataacacaagtgtgatgtgggaaaggtccctgggaaacaacagtgattctattaggctggtgcacaaataattgtgggttttgccattactgttgtacccacataatagctcagtgcatgcaatttacaaagtaataagtgaaatgctccccatagttgactataacatttcctcatttttctctgaatttgctttttaaaaaactcttccccttgccattcccttccccattccagattgtaactgcttctttccagctgcatcagaagaaggggactttccatgtaggtgttattctcagaaaaggccagaaaagaccaggtcatggtggggatgatttgctccaagcataaaagagaattgtgatggttcaggaagactggaaaataacgagactggaaagaaatgagaagggcttcagaggaatggcacattgaaataaaaggaagtggtaagaacaggaaaacaagtggaatgaaaggagcacacagtgggcagggatgattggatagactgtggaataaagataatttgggaaaaaaatgggcagaaaataagagaggtttcatggttccattattgtatattctattcctcctactaggttaacatttcccagaggggttgggtggagacggggaaagcctttttgccctgttgtggtccatgtgcccttctgctggcagatccacttggaacaaatctccatgtgaatacatctcctactcttttcctatttggagtttcctgatgcttttgtctacctcttgtgctggattagagcatccactgccagcatgcattaatgtgataaacaaaataaaagtgaagtcttaagtagaactttgcaaggagtagcagtacactatacggaggtattaggtttttttgaatatgacttgaagttgttaaaatgatattttagagttttgatgtgcttaaaaactggaaattgagaatttttttttttattttttgttttaagttaaaaattaagcacaagatgccaggcatgggaggatcactttgtgaggccaaggcgagaggattgcttgagcccaggagttcaagaccagcctggacagcatagcaagaccccatctctgacaaaaaaaattagctggatgtggtgggcatgcctgtaatcccagctacttgggaagctgagatgggagcattgtttgaagccaggaggtcaaaactgcagtgagtgttgatcatgccactgccctttcgcctagatgacagagtgagaccgactcaaaaaaaaaaaaaaaaaaaaaaaaaaaagcactagaaagttgggagagagggcagcacttttcctttattgctgggttagtatgcctttgtcaaaagcagcttgttttaaatgaagatgtcatgcttatttcaagtcctcttaaaaccaaattcactctcatatccccttggtatgtaataaaaagcaatatatataaatatatatatatatatatggcatttctgtgaaataatcaactcttgctttctagacttattagaattacctcatgaaagcaacatgaggaagtgagtgggaagaactaggtctacaacagttaaaaattttttttcataaatgcatttattactgcttctcttaattcacatggtgaacttccattgaccttttttcctttttatttgaaaagacacaaattattgtatggaacagtacgatctttcaaaccaggagggatggagaaactgccatattttaggttcactgagttcctcaaaactatttaagtgtcttgccaagcacatttttaaaaaattcatatttagtctttcaggaagatttatcttttgttggaatgttgctccaaggaactctgtaatataccagcatctcttgaaagctttgttaaaaatgatgtgttacttaagtgaaaaatggttatgggtgccttaattattcagctatcaagtgtttttttttttttttttttttttttgacacactgacagcattcgtattatttactacttacactatcatccatgggaagatggctccaatgtacttgtagacagttttcaatttgaaaactatatcttcatttcattgaagaatttcatgtctgggaagtactattccctatagagtttaatctctgggtatagtggtctcaacatcatctacaacattacgcatgaggactgtttagagtaagttaggtaagttgctattgcattagcattcctctgaagaaagatgatcttttaggtagtaaacatacatgcatcatagaatcagtaggatttcctgatctgcctgactctgcagtgcttccatgcctgttttctgtgtcatttcttcattttcttttcttttatgggttgggggagagacagggtcttgctctgttacccaggctggagtgcagtggcgctatcacagctcactgcagcctcaacctccttggctcaaacaatcctcctgtctcagacttctgagcagctggaactacagacatgtgccaccccacctggctaattctttttatttattttattttttgtagatacagggtctcactttgttgcccaggtggtctcgaactccttgggctcaagtgattctcccgcctcggcctaccaaagggctgagattacaggcgtgagtcaccacgcccagccctgcatcatttcttttaaataatgtcaaggacagcaggttctatggccctgctacccatagttggaatgagagatacagtaatcatctaaatcttagcctttatagttaagatttcagaacttggttttctgaactgaataatctgtgggatgtttgtacccagaaattaggattctcattcatctctttttcttctattttatatgtttgtttcttgcatttttagattctatgaattctctacccctctctcctgttctgtatatctggcttccaagacttgccatatttatcatcagtaatactataaatggacttttaaaattcaacactttcattcattcatgtactgctgaggtattttttattttattttgcattttgaactgggtaaggaaatagaaaatgataacgatacatgagaaggatgtttttaatactagattgttgtcatagctgtcaacctatttacttttgaagaagaaagtttcaataattgctcttattttaagactatgttacaagctcattgagtgcatccaaggaaaaggaagcatttcagataagctaactgcccttctttaataagggtgcatggtccagttgctagattgtccttgtcatcttatttccatttccttccttttgtccatttttatctttaatgatctcagtaggaggtaaacaacctcgataagaggataagggagaatatatccaagtgcggcttgtcaatagctctgataaacatttggtgtgtgtggaaaacctgaaacttaaaatgattctcagaaattatctctagggttcatttgtaatattgggtagattactatttctgtaggtgggaaactactatttctatagatcaaaaatagttgaaattttacatgcttcaacttaatattccacacatcaatatgaaagataattaataggtatctatacaaagtatatctctactctgtgtctcagctgttggtatgctagaatttgttttgtttttactttcagtgtcaaaatacagtaaaatgtttagggagagaaaacagtgaacatcaaagaactcaggtaatgtgtccactgctaggatgttttttgcaaatagatattaaaaatgatattttcaggggagcagtagatcaataatctgtttaaggcaggagatactggattttataaagatatgaaggaataaaatgagtgcccaagatgtttacttgaaatggtggctagagtcctattgattaatgctggtgactgagacttcaacattgaaaataaaccatccccagacaattggtaattataggtgacaattatgttattatactttatttaggtagtagttttgttcctggaaaattacttttattcaagagaaaaatttgaagcatttgagaactgaatgttttgtgggaactcttgtgtataatttttcagttttattcaatttcataagtcttcagggaatgttttcaggcctagatttacggacactgtacatagtacctactaccaaaagaacattctaccaccaggcttattagaaagcatattgtctgttttcctgctgccttgttgtgagcagatgttccctcagcatttctgaattattttaatgcacaagatgggaagaacaataagttaaaagaaaaagatagggatgaattttttgactaggtaactgcatttgagtggggataaatgtcagtattctcaatcttttttatccctctgctcaatttgaggtaataccatgtggtgacctagtctgtcatcagaccctaaaaattcagtaacaagcctcagttctgtattaataggagaatggattaaaaataaatttgtaataaactctagcacagtcttgccacttgagctcagttcctttgatttggcccaattttcttcactgtttttcttttcatattgtaatgactactgtccacagagaaggttaacacaatggaggcatacttctgatgggctctgtgtttgtttcctgtgactaacaaatcagcacacacaaagctggtgcttcttttttttcccccatagagatggggtcttgccgtattgcctagactggcctctaactcctgggttcacagcattctgccacctcagtttcctgagtagttgggactataggcatacaccgccgtgcctggcaaagccagtgatttaaaacaacagaaatttattctatcacagttctggagagaatgtagagctcagaagcccaacatcattgttgcccaggtgaaatcaaggtattggtaggcccgagctccctccggaggctctaggaaaatatctgttcctcgcctcttccagcctcaggtggatgctggcactcttttgcttgtagccacatcactccagcttcaagaccagcatcttcaaatctctctgctcttttcttcccctctgtttgtgttaagtcttcctctgtctctgccttataagaatacatgtgatctcatttaggtcccatctggataactcaggataatctgccatctcagaatccttaacctaatcatatctccaaagactattccttgcagggtaacattcacaaccaccacagtctccttccagcatctgtgttctagaaacctggctgagccagcccatttggctgcatcctaggtctgattgatacaccctcaccttccacaacatctactacctactatccgctatatgctttttagtgagctgcagttaatttcatccaaaggtacaatagcagcagcaagtatctgtctctactaacacaggccaagaatcatttagcagagctacctcctctctttagagaagcagtttacgtagggaaatctacacacacactttttttttttttttgaacagggtctcactctgtcacccagactggagtgcagtggtgtgatcttggctcactgcagcctcgacctccctggctcaagcaatcctcccacctcagcctcccaagtagctgggactgtgggcatgtgccaccatgcctggctaatttttgtattttttgtagagacagggtttcaccatgttgcccaggctggtcttgaactcctgagctcaaagggtcctcctgcctcagtttcccaaagtgctgggattacaggtgtgagccaccatgcccagcctatgcacagtaaattaagctagtttaagcagttcataaagctgaatgctataacaactgtgctggaaatagaagtgagttgtgctgtggacgtgcatgtgtattcacatgtaaaatggcggctgtgtattttcagggcatatttaatagttaaatatcagaatctgtataattccttttaaatgatgaccggagctcatggcatttcccaagaagaagtgaaatgaacctatctgatttggaacatatattttctttaaaaagtaagtaagattgttttcagggagcatgagataagatttacaaagtttaaaagtaatctttaatgaatcttatgtcccgtaaatgttaaatagccctcagggaaattacataaagctggtactcattggatattacactaaatagctaatgttataatagattgattagaggtgtcttttctctgatggctgtcatgtaggcagagtctaataattaatttaattttgaagaagatttctgtggaccctgaggtgtcatatgccaagtgggtgacaaattctaaagccctgttatctgccttgtgtttttaataattattgcccattgtaataaacttgtatcttagatttcttttttcacccttcagtgggtgttttgcctaaattgaaaagacatagaagattttaactacatatgaagtactattttaagtcatttgagatttttctctcctccagaattttttaatcctgtcatacttggcggaaaataatgtatacatcaaagtcaagcatacttaattatatagtttaaacatcagtgcatcattagttaaatgaacaaattagttaaaactctgtatttgctgtgggtttcaaaaattacctggacagtaattagagttacaaagagttctaaaacaaaagttgatgagaataatgaagttgaactacaaagccctgattgtataaatagggcaagaagaaataataccaagaagtgggggaaaaagtgttttggccagacctgagaactcagctggatcatgtggtatcagccaagataatatgtgacagagaacggcagatacaaataccatgacactctgtacatgggaatagagaaatcagggataaaaaatacaagtcatgtagatcacagctctccgtgtagccaggctcaagttaaggtagttcagttgtataatcaactttcgtggtattgctaggaccttaatagaggagaggcaaagctgaggggagatcacattatgttacctctctggaatagtttctccaatctttccatgcatttaaaaaattggatctgtctaattcaagccatttagttctacccatgctcatgatcctttggttttagctacttatgtgatttttccatacaaatatcagtcacttgcagcatataccatgccctgccagttccttttggaatcaatttaaatgagaaaaataaaggactttgggaaaaactatttaagtgtgtctgttaaattgttttactatttgagaatagttctggagtctgaaatacattttccatttaatagtatttggcttttttttgtttgtttgagccatagcattcgtggaaatatgttgaaatcttaagtggagagaatatgacttactgcttttggtattacttgctgtctagaacgttacagtctccactatagtatgttcctggtcagcagcattagaaacaaggacaacttcagactacaaagaaatgtgcatattgtgattcacaactttcttcctattttaaaatctccatatttttttttctttcctttccttttcctttttctttcctttcctaggctctctctgtcatccaggctgatatgcagtcgcatgatcatagctcactgcagcctcaaacactgcatctcaagtgatcctcctacctcagcctcctgaatagctgggaccacaggcatgtgccaccatggctggctaattaaaaaaaattttttttttttttttggtagagatggtcttgctatgttgcccaggctggttttgaactcctggcctcaagtgatccccttgtcttggcctcccaatgtactgggattacacctatgagctactgcccccagcctattctggattcttcagattgtagagccaactgtactacaaatctgtgtggtttttttgtttgttgttttgttttgttttgttttgttttttggagagagggtctcactctgtcgcccaggctggagtgcagtggcacagtctcgactcactgcaacctccacctctcgggttcaagcggttatcctgcctcagcctcccaagtagctgggactacaagtgcgtgccaccatgcctggctaattttttttgatatttttagtagagacagggtttcacagtgttagccaggatggtctcgatctcctgacctcgtgatccgcccacctcagcctcccaaagtgctgggattacaggcgtgagccaccgcacgcggcctaaatctgtgcttttttataggacatttcatcaaatacatattcttagtcacttgagtggcaactcttcctagatattaatactgtatacaaaaagttaggtctagaaaatgacatcaattattgtgagacaagtaacacatttctgtatatccaaaacatatttcattaaatttgactgttttcctaaatttccaatgttattgtagtgcttgttttgtaatattgtgcttgcgtgtgcacatgtgcacttacatagagcttaaatgggtaaaatagagtgttactctctttgctggtctcactgctttagctgttgttcccttaaaattcgttctctgcacagcagctgggtgaagtttttattaaaacccccatgttttcctttcgaacttagcatacagtgcaaactctactatggctgctgcctgatgcgccttcttccagccctgctccagttctctgtgcccttgccacacagcatactttctccaattctctaacatgtggggcccattctgccctagtgcctttgccctctctattctctctcttggaaagttcttttatactttgtatagtagaatcctcccaatccttcctggcatagcccaaatgcttcagggtcagagagaccttcttggactacttcatcacatcacgcttctctacatattcttcatgacacccaccactagctgactctattgtgtttgtttgtgtacattttctatattctcctgcaagagttcacccttgactatattggaaacagattggagttggcagaagataacatgcagagctcactcaaggggacttccagacatcttttatagataatacgaattgctaaatttgcttttcatctaaaaaatttcattttataagacttgggttaaaatacagaattccattgcagttggaaagagttaccagatagttcattatgtgtgcttgaatgccagtcttgcacagcatgtagcacagtcagtatgaaacccttttttgaggaactgaaatgccaggtaagaattctatggtaagcctatttcagccccacaaatgaaggcctttcctataaatgtggtcttgtatttccttccagccagatgaatgcaagaaactgtcatcgttgctctctccatttttgtttagtaagaacgagcctctttaggtgtttgtagagttattttggcagtctagtattatttccactatcattagcttttacccttaggtagaacctggactttgtgttttcacctatccaattttcattacatttcatgtaattcatagaaattaaaatttcactcagatactcttgactgcatagcaacagacctattttggagtattaaaacaaggttttaatatagaaactgtttcaaccttttgttttaaactattgatttcctacatagtttgggaatttttttagataccagctctcttcagtagttccgatttcttaggacttttataaaaaacatcttgaaaaaatggtatcataactttaatattactcagcacattttttgttgttgttgttcagaatggtttatgcgctcttattctgatgaaaaagaagatgaaaacattcttttctaattgttgggaaatgttgtggaacctgactttttgaccgcttttgccaatgctagggcctgttgacctactcattcccacttggctctgccagctggggctgccttaactggtctccatgctcctatgagagagttcttaggtaaacgtcaagtctgcatcagaaagccgtgcagacgtggagagccatctttttccaaacgttcagtgcaaggcagagcaacaggctctgctttgagaattattgctggagacaccatccacgcatgcaagcattctgtaccgggtagtacactgacaatttggaacaaggatagacactgccatcttggttcagaaggcctcctaataatggcattctagaagagaaaacctggattatgtagcctaagatatggtcttgttctggtagaacatgtgtgaataggaaacacatcgtagcccttgctgatactgttactagggtctagatcaccgttgggcttaagcagagatgggtaatttttgctttttcttaatattccagcagtctaaactaaaaatatggagagattataaacctgtgtttgcctgaaaacaagattgtcaccaatctcaaaagtcagaaataaatcattttttctcatactctgtataatagctataagagagtggggactggaaaggtattttggagtttaaaagtagtaaaacacagaaccatgagtcctgcttgcaactttaataaaatttgggtattgtctgtgtagaacaccttttctgttcctgggttaggctataaggacctcccgttatgaaaccaagccagaaactgccctaagattaaataccttaaggaaaagtaacctttgtggcagtggggaacagtcacagctctgagaccacatctctggtcagtgaccagagatatctgagagctgatgggctgtagtggggagaaggactggctgctacaggaaataaaccttatttcagacccacctggaaatgatcttacttaatatgttgctttttacatgttttagggaatttttagattcacatttcaggagactattctgtatttgagcctttgggttttgctgaagagcatagaaccctaaaaaccgaatatgatgatcttagaacttccttaatttctttctttccactcttagtctcttttctcatttcctttcactgctctgaaaattaacacctgctagggaaatcaactttaggctgctttcattggaagccagtgtctaaaaatcaatcctggcaactagtgtaaaatgaaatttggaagatgtcttgattctcatggacttgtgcaagctgaagttattaaagaggattaggaaccacagctggtgagcagatggaatgcttataatttcacaatctgaggtagctgtaaactcaaatctgcacaaaacttctttgctttttctctagtttatttcactttatcttcctggactgtaactctgggcaagtacgatcgtttaattgttggagatgatgagccttaataggttcctcatttagatggcatcatttaaaattctagttgtacaatttcatactcagaatttcatttcagaaaccaactatttaataatggacttattaacagcacaataagtaggaaatggttttacctttcgttcaaaatgtagaaatatattttaaatttgaacaatgaagactggttcacagtaattgcaactagacaatataactacttgcttcttaaagaaatgcttgattccatcagtttcttcagctttttctgtgttcatttctactagaaattcctgtgtcatagaaaaaaagtcccctaaagccaccttcttcattggctctgttacctaatcacaggctccctgctccctgtatattccccgcacccatgactacttctctgttcattctatctgatcataatataggggccttatacatgcacagagcaactgtttgccccctcagaaacataagcctagaccacattttctgggtagattagtgttttctccacaaaggaaggtgtttgtgagactttcatccagtggctgctaggaaggtcaaattaggaacttttgtctacagatacaaagacattaacttacactttatgttagtggttgttactttatttaacaatggaattagtgtccactctacagtttagcacctctttatccttactgaaagactttagagaaatggctgctaaggtggagtttcttcaaatacagaaaaacatctggagccgtaaataagttgagcagcccggatacattctgtactagctggttgggaagaaaacaacacagggatatttcaggtggtgccgcacaacaaacagcggtagtttatggtctgagatagtctctgttcttttggaaccggtgtgtgcttcttctctaaagccacagtcagcagcaaaaaatactgtaacatgtcttttggaagcaattactgcatgatcctcagtgttctagcctcagaacatcctgagtgttccatttctatacgtgcgggagaagaggacatattaccgatgctttggcatgaagtaatctggagaattattataggatatggtctttcttgaccagcttttgaaatggctttcagtagcttctctttggatttccaaactgaccttctgtaattggatatggcctcttacagaagcagtagtataaacatgtttaaacttctaatgtaattattttatcctgaaccaagtagtctagcagtctcttccagcggatagatttgtttatcttaagtagagttgatctccccgccttacccttgttacctttggacacaggagatggcaggagaagaggttttggatggcccccaagaagaagtagacttggaccgaaaatcagaagacaagaagacctgaggatttgatactgggttcttttagattttcctgtgcgatcttgaccagattcataaaatctctgatttgctgaatctatatctagtaaatgggtataataatatctaatatgtatttgcatatgtttggtatgtgtattggtatgtgatgactgacataacaaagtagcacaaactaggtagcttacacaacacaattttatcttctcacagctctagatgctagaagtcagactgcagtgttggcagggttggtccttcagggccatgagggaaggatctattctaggcctctgtctttgacttgtagatggccattttctccctctgtcttcacatcatcttccctgtgtgtgtctgcatccgaatttcctcctcttctaaggacacctgtcatattaaattagggcccaccctgatgagctctttttaacttaattacctctttaaaggccctatctccaaatatagtcaaattctgaggcactggggggccaatccagatttttttggtcatccattttttttcttttctgttgtcttatctattatattttcctcttgtgtgtttttatttctcacccagattagtccatgacctaaatggccgcttttgctcacaactgcctcttgggctcaataagctcactgttgtctagggtttatacacctcagctgttaggagttggagatcagatgaatgtggtttatcgtctgtagagtgaaatatggctactaagtggtgccattacagagccaatttggggtgtaaatctagtatttcagctcttggactttttaaactgcatctttaaatagaacactagtttcattctgagggggggaaatatacatgcagaagacattaaggcctatgatgaatgtcatgttttgaacaacaagggcagctcatttggacaacagaaatccatctgcagggcttaagagaatcctttattttatacagaaaccgaataagttccaaataatataaatgttattaaagacttagaatgagatagcaatagtgcatagctttggcctagagtaggtaggcttgaaaacaattcaggacttcttttacattgaccctggatttgtggatgtctgttctatcataatatgttttagagaataaaatggaaaagcttgtaataccagagagcttctattcctcagagtggttgcaattctggagaacaacctcttgcaagtagcattttccgtatagacatttcttgcctgctggcccaatcttaacttttcattttagttcatttctcagttcagtgcatttagaagacagtgcatttttcttttctggactagggcagatggtgctgtcacttttgattatctggttttttttttaaagggaagtgttgattagggagagcaagaaatgaaataccaccagattaaattgagagcagaaattatacaatcccaaaagaggcaaatctgttctatgtttttctgcttagtttactatagtttatgtttgactttctagatttcaagttggatatattttaaaagatcattttaagatagcttttgggttatgagtttgctttgtttctgctttctggaagatatagaagatagaaatgtttagatggttttctttttctagtcacatttaagtaagaagatccttgggtaagagtagcttttaacaaatccaaaatgtttggataatttctactttatgccactgaaatctctcacttgcagtctagtggcactttgtgtcttgttactgtttggccatctaatcttaaattagaatatttaacaggtgttccaaaccagaagtcacaaggaagtggacaaagaggcccagaagatagcttgaagagcctcctgctggctacatttagggcaaatttagtgtccaaaaaataatgatggtggtggagtgtagcagattttaacacattgaattaaaataaaaagaatctgggttcaagatactttgaaaagtgggagggagaactaataaacatagaaggaataacagaattagaaaaatcaccatctggaaactacctgtaatataatgatacatgctagagatcatcagtatttactataactgtcaggtaaaagggcataatgtgctttgacaatggagaaaggttttacacacaataccttgagcaagtgaccaaactgagcatcacctaatagttcaaacagcagtgtgcatgttctcatgtcatacgatgggaagtatatctgtaaacaattcttccccaaaattcttagcctgtatctaattacgaggaaatagcatcacactacagatagtgatatattctataagaaaactggcctgactgctccaaaaatgtcaactttataaaaagtataagggatttctgttctagattaagagagactagtaaaaacctgacaactaatgcatacttggtcctcgattggatcctgaattaggagaaaaaaaattaaagatgttattggaacaattgacaaaatttaacatggattttaatctcaaatttattcgattaatgttaaatctgattgtagtaatgtgtttttgtttatgtaggagaagctccttgttctcaggaaagaaatgctgaagttttgggggtgaaatgtcatgagatcaataactttctttcaaatggttgtgaaaaaacgtgtgtgtgtgtatatataagtagagatcaaatgtgagcatgcaaatgtagcaaaatgttaataagttgaccaatctaggtgtttttctatagcaatctaggtgttttgctataattatagcagcctgagctataattgggtggcttaagcaacaaacatttatttcttacagttctgaaggctgggaagtccaagatcagggtgccagcatatttggtgtctggtgaggtctgtcttcctgatttatagatggcacgtttgtgctatgtccttgtgtggctgagagaagaaagcgagctctctcagtacccttataaggacatcagtcccatctatgagggctttatcctcatgacctcatctcattctaattaccttctaatgccatcactttagcgcgtagggttttaagatacacgaattttgggagggcaccaagcatttagtccctaacagtgttcatagtactgctccagcttttctatagattaaaaatgttttaaaatatgtattttttacaaatcgagcaatttcacataaaattttgcatttctagattctctagaaaagtgggagtgtctgccttacacccatgatacaccaagaataactgattggctgcatagcagctgcccccctcagatagggtgaggttttttccattttccatagtccttacccttcccttttgttttatatacccactttctttactcattgatattacctgcctagtggctataggcattttagtatgtacccacacatgtaacacttgctgatttcttggggtggtagtaggttgtgtcatggatggtaatgactttttcatatgctggaactcttgagccctctggatttgatacccatatcaggtgatgagcttcacttggctccttggccacaggctgagtatctagccttattcccaaataattcagtcatctgagacataattaagaaaatgtggatgtaaacactgttcaaaacttgctggataggagatatacatattaaaattatctttcagatgcaacatattagaaattgtactctggattctgcctgtcagttggcacagtcttgcaaaaagtattgtataagctgcttgaaaaaatgtaatatggtatgccaagtcctaatgaaaaaacattttgtggaaacgtttgtagactcccatgcaaaaagtagtgtatgaactttaattacctttgtaagttgttctatcctgtgtttaagtgactactttcctgttacatacccagggagggtaccagctcttgctggataatcatggtcttgagccttcccccaaaacacaagagcagtatctggcagaggttagggttcagctagcagtgaacagttcaaaaacacagggaagaagaggaaaggactggtgctagagttaatcttgtcaagcaaacatatctacctaatacttaatctgtttttgtgggtttgcatccctgtacaatttgatgttcttaaaaacactagcagcctttggccgggtgtggtggctcacgcctgtaatcccagcactttgggaggccgagatgggtggatcacttgaggtcaggagtttgagaccagcctggccaacatggtgaaaccccgtctctactaaaaatacaaaaattagccaggcatagtggcgcacactcgtaatcccagctactcagggggctgaggcagaaaaatcgcttgaacccaggaggcagaggttgcagaaagccgagatcgcaccactgcactccagcctgggcaacagagtgagactctgtctcaaaaacaaaacaaaacaaaaaaaacactagcagcttttgtccagttccatgcatatacatgatttttacattgtgaaatgaacacaaagatttttcttagggaatctgacagaaatgagcatagaatcttactagtatttcagttcattaaagacctagacctggcactccatgttgcctctcttattaccccaggtgttacacagcatttgcctgaaggaggccatttgcctgtgagggggttaatgtgaatgttccctgtagggcttgactcaaatcacaggcctggggagtggggggcggggggcggggaaatcatcctgtccagtgaattccagaaatagcaacaaaagctcagaggaaattagcccctgttgtcccattgacattctctggccatctctcctgtccagctgggcacactgcttggaaaagaaattcatttgtgtttctctcctttctcttaaggttccagaacctgtttggaacctaggccgctcttgaaaatattttcctggaatggaaagcaactgcatgcaacatatgtttacctgcctgctgctttctttttcggtgttgagagtctggtattcccttggctacctttcaggatttcaaatagagtaaccacttcaccagcgaaatggctagcaagatgtttatctttgtatttttagcatcaggatgattgatatctcaagatatttctggaatagttgtttttggagattaactgcattgtccttatattatgcaagtttattcttcgtgttgtgattttactcatctttaatatttgtatttaaaaccactaactgtggatcatagtcactaaatggagagtcttagataattaattcttcttttgtatgcgcttattgattcctctttttttcccagcataagtaatatttcaaaattgaagatggccaatattctttttctgagtagaaaagcaattcaacacatattcgttgttgttgttgttgttgttgttgtttgtttggggacaagtctccctctgttgcataggctggagtgcagtggcgccatctcagctcactgcaggcttcaactcctcgggttctagcgatcctcccacctcagcctcccaagtagtcgggactacaggcatgtgccaccaagcccagctaatttttgtatttttcgtagagatggggtcttactatgttgcttaggctggtcttgaactcctgggctcaagctttctgcccgccttggcctcccaaagtgctgggattaccggcatgagctaccacatccagccatcaacacacattcttaatattgttttcttttgtccccattcatgcttatcagcattagtaggcattgactaggtatctagcttgtccttattattgagtagtcacatttttcgttttcacctaaaattatttatttctgtttcttttttgtttgtttgttttcatattgattgtttactgttggctttaggcttcttatctccaaaatgagcatgatcagaagccacacattttccacgcccctagttcattatacatgatttgttaaagagagtagctatgtcagctccttggcagatctgagaaagcatatgatgttatgacagggatatctacaaatgagccttgtggataagaactagacagaaggtttagagagaaataatgttgatgtcatcccattggaatgatagagctgttacaaccagaaatacattctatagctagtagctaagtgtgtagctctatttcttttctaagaaggaaaaaatgtgaaataaaccaaagaagtaaagtatgtttataaaggaggatattttaattagtttaggtcttaacagttattcaaacagtctgaacttaggtttctttttggagcaaacatgaaaaccattatttatggaaaatttaaatttcacatgacacatcttccctctatgtgtgtgggttttttctttctttcttttttttgaaaaaaactatttgctttgcttgtgtatttttatttcaaccttccttttactaaaaatgctttatttccttggtgtaggagatttgtttttagggaaaagaaagacttgtgtctctaagctgagccccctttcccttttttagcatttccagataggctggttctcagctgaccatgtttgaattagaggcgcccaacttagctccttttcaaaaactttcctaccattaaatgtgcctatatctgcaaaacaaaatgccccttctctgtgtgaaacactatacaagagtgccttattattattatttatatttatttatttatttatttatttatttatttatttatttatattttgagacggagtcttgctctgttgcccaggctggagtgcagtggcacgatctcagctcactgcaacctccacatcccgggttcaagcgatctcctgcctaagcctcctgagtagttgggattgcaggtgtgcgccaccacgcccggctaatgccattcaactgctaagaaggcagcaatgtagaaaatggttttcatgttcatttaccccagccgtggtcaccagcaaggtggaatcaggtggaaaatggtttcgatctgtttacttacgttgtggctgcttcagtgtaaggaataggaaatatagggtttgcttacatgattttgtctaatttatttactgcacaccagaaggtggaaaatagcccctgagaatgaagaataagaaacttgtcctctgaccttgcaccagaaccttgcatttgtgcacttctggggcaatctcttgtttagttggctcacaccaagtaccaagttcttaagaggggaagaaacaaaaaccagacagagttttcagcttgaataaaagaagctaccctaaaggcaaatcagcagaatttttttgttttgtttgcttatttttgtgaggggatcagttattcttctttccttcacaatatgggaggtgtgtgcatgagagagacaggagaaaaaaaacaaaaaaaaagaaaacatgccaccaaacaatagcttcatccaaactctgacatacactctttgtacagctgggctctgaaactgttttatggaaagagtggtcattcagtgtacttcgaggcacgcttagatcatgcttagggtgagataggccaagggcttagttaactcgcttatttaggtcgtagagatgtgaattttgacattttcatactagactgttagctttcgtacaagagttgatcgtttatgtgggaagtaactgtcactttaaaacaaattttatttttactcttgtttggtgcaaattgtgtccctgggttttatttaccttttccttcttagtctgtggcagcacgaatggaaaagcattacattaaataaatgtaatataagtgcatttttctctcttttttcccatatttacaattagaagcttgaaagaagacagaattccatctggccttggtaccacgtttctcctaacatgaggggctagtgaccagacacgatagggcagtgattgctttgtcactgccttccctccccatgccctgccatttttatttttgatcttctcagaatcctttgtttatttggccccattcaaggcccactttttaaattcttcctttcttcatatacattcccagcagataggtggcctttgctctattcatttgacaaccttttctaagttaaaagcaaataagaaaaccaacataaaccttcccataggactgagcagatctcctctgctgccttctctttctcccatccacctcaaggccaacaccccaccagtatcaaccccatgttttctttctcagtgtcctctccctcaggatccctagatctctattaactcttcatgatacagtcaaaggttatacttgctttgggaccatgtattagacttgtggccctggagaaatcacatctactctctgagcctcagtttcctcatttgttccttatattccttcctcagtcaacaaagacacctatgggtggtgtgcccagcaccggaggtgagaaccatgatgagctaagtaagcataagttcctatccaccactgtgaaatggagcagagaatgtccatcatgcaggggatattgtaaaaattagcaaggtgatgatgcatagatgagcacgtatgtaggtgctcaggaaatgtcagttttcgtgattgtaatcaaaggcaaacagagaaggcaagtcctgacctctctttggaagttgtttttatctcaggaggacctttcccttgtatttctggcttttacctgaaactcattttttttgactttggacagatttttttattattattccttttaatctagcctctttctctattttttctttttttctgttaaaagcataaccatttcttctgtcatgtgtatttgaaagcaaggtgggagggggcgttccagtttttgtgggacaaagcatcctgttttaactctgttcttttatagtgtatttctagtgcatagtcctgaggatgttttatttgcagatccctttaattcttcccttccttgtgtgttgagtaggtgatcatccctgttctaaacttttattactccaaggatagggtctgacttgttgcctttctaagataatctaaatgccttcttcatagcaagaggaaacagttacctccttcagctggttgtttgaacataactatgtgagtgtttgaaaccatagggtccttcaaattctacaataaccagaaattgagaacattttgtctttaacaactgaaccagttcatttattgtgactatgcttatgttttgttttgatttttttctaaccggcagttatctcttgagattatataatatttacagtttacttagcaggggcttccagaaaatgtgagggtatgtcaacttttgatttatggatacagtttataccttaacatgaatacatagttataaatgagcttgtgacattgggtcttttgaatgtgggttttcttttaaaaggctacagttttcaaaaccatgatattaccaccagcccatttgtatttctcaccagactaaaggtagcacgtcctactaaacagaacgcaacaggaaaaaaaataaggaacaagtccttttaaagtttggagtggtgccaactacaagtttttgttatttttaatatagactttgttcatttatttagtcaagaagcgtctgttgagctttgcacatgtagggcctgtgctgggtgctgcgggtaaatggtgattttgtcctagggcaggggtcattgaactatatagcctccctgtagcctgcttttgtatggcccacaaactaagaggttgttaaagttttaatgcgttatgaaaacaaacaaaaagcaaaatatgcaagagacctatgtgtggctcacaaagtttaaaatatttatttgattctttaggaaaaaatttgcctactccggaccctgtggtgtctctgtcttcctcaatcttatgtttgttagtaagaaagaccagaagtaagcaagggaacaaataagaaagatagttcttttcagattttgataattgataaggaaatagcatgtaagagtgacagaaatgaggctggtgtcaggtgtagcagttaaggtgggattttttgaaaagatgaatttaagattaaacctgaacagtaaggacaaacaggtctgtgcagagctgggcgtattaacccatctctcactccttaggtccacatcccccttcccctccaagtgcctgcttattatacacagagctcagctaaatgctggttcctggaagactatctcgaatgccctcttttgggttacctttactacagcacccatcacaaggcactgtaattgcctatttggtttcattcttcccacctccctccactagacttgaaatatcttgggggcagggacatatgtcttagtgatcatatctcgctagcgtttagctcataaactaggttaaatggagtctactctaaactcaaaattagattccatcaagcccactgtgaaaatcaagaagatcctctaacaagttgcagattcttaagttctatcacttatctttttttgtacacatccttcccccctcgtactctcttctccaagcactattctttcatttctaaaacctaattattgccccacccccaaaacatgcccatttccctcgtgttattaaaaggcaccgtcatccatccagttgagcaagccgaaaactaggaattagccttggtgtgtcacgtttcctcacccttacccatcacatccagtccttcaggacccacacctcctcaactagtcctgtctcactgtctctactctcagctctagcccaggccagctctagcctttcctttgcctgggccactgcagcaatccactgactggtctttctgttcccttgcttaccttccatatatccgttgttcacacagaagacaaacacatcttttcaagctcaaaagaagatcatatctgtcccttttcttagacaccccagtggctgcccgtcgaacgtaaacatgtgaacttaagtaaacaagtaaaaacaagtaaataaacaagtaaaaatacagctcaaagatttgagctcacagccctgaatggaataaccattgtctcttcaaccacatcttattactctcagtttccaggtacattggtccctccacttgcccttcttaggaccctttattctctgttgcctgttaaattattaaatgttaaatggaaccccgtgttaatctccttaacatcgcgaacacttaaaactatacagtgacaagtcagtgaaccatagtgaaactccattccccaatgacaccttcattcctgattttcctggtaacatttgtaatatcaaaaattcatgataacaggcaactgatttaatgataactccagttaaaaggccttggggaaggaacttgacaaccttactgccttctaatggtattgtttttccttttttctttttcgcaatgcagaatatgagttggaagtaaagagggtgcaagacattctttcgggaatagagaaaccacaggtatgtcttctggatttctcagcataaatgacactttttaaagtatttcaaatgtgctttttttttttttccaccacacagtaggtaaggaaaagggctctttccctttgcagattactcatcaactatgaaatagtgttcggttcagttattaatggaccatgagacatagaacagtagccttctgtgtgtagtcgtaatctactgaaatgtcttctttatttaggtattctgaatgcaattagatattctttccaaagattcttttttttctctctcttttttcagtctacagttttcttttggtagtttttttttaaccatataaatgtagtaataatttttgaaaacctcagtaatcccaagtatttttccaagtaaacttcaaaaagatatttaaatattagctgtgaaaaataagtccagaacattgggtgcaatggcaagacaaaaaaatggtcgaagtggtgaggttttgattttgccaggtgctttgaaattcaagtgaaaaactcagaatgttgattcagcctttcatctgagattagagagccagagttctttggagtattttctagctgaattggaaaaccttgattctgcatgtgtttcaaatactgaggctttttaacagaagagtccaaacatgcctcagggtacatagttgaatttgacaacctaaaagcttgaggtgtgttgaaggacaggcataataaggcacttgtagaggagtggggtgttgccgttgggaggggtgcagggagtctgtacttactctggtgaggagcaggctgccactgggggtttttgagcaaagaagttatgtaatcagggctgcattttcagaatgatcaaacagttggtggatgagttggagtgagaagaagatagatgcagggaagagcagtgttagaatctgctactgtagtcctggtgaaaggctatgggagtcaaaattagggtggtgacatctgtgtggcaggcagcaggggacagatacaagagccattccagagatagaatacggcactataacctgttagaatagatatcaaatgtcaaggataactgggctttcgggtttggatgcctcctctcaggaattgcttcctctaagatgccttcctgattgctgtccatgcccatcaagtgggaggctctacccccagctttgctgtgcccttcatggacttctgctactgtatttaatatattgtactgcatctacttgtttctgtgtctttcccggtctgtggtttctctaggacaggttcacagctttgtcctttttgtatcttcagtgccattcttggacatgctgagtttgtttcactgtcagggactctggaaagatagatacagcgggcggtcgcaaatgtctggtaggccgatgctgaggagcgaggaggaacaagatacaagacagggagatcacatgcatagcaatgatacttcatgttgtaggattggatgatagctttgcagacgggggtgcagtataagggagagatcagaaaaggtgtgagggcagaattatggaaaaagcttatgtttgtagcatagtagaaagaagaaaaatctgtaaggaaaacagaggagtcagagagagagggcagagcagcgggttcactcatggccccaaatgtagtttcagaactccatagtcgcttcttaatcatgtttatgcacacagtgctgttcctcagatattcctagtcactgctctgctgaagaagtgacagaatctctgtttcttgtgggtgagatggctctagcaagacaaaagccatatttagattcattggtcctttttcttgatgcagtatttcttaggcatttaatcttttgaggttttagggcagggtaataggctttttgtaagtagctgtgttgtaaaatataatagggtaagagcgtcatctgagaacttttgcctgtatcatttggaaacaagcattgcttggctacagaagcacacagatgttagctctatccatgacagtctggccaggccgttctgtacccatcgcagagaattggcttctcagagcctagtgcctttaggcccctgaatcatgtagataactccccttgttttcatttggtgctcacttagtagccttttgagaatttgacttccttgttgccaacagagagaaagtatgtgaggcaggttgacagtgctatctaatctaccagatacttctgtttctcattatgaatcaattaactggcagtctgattgtatatatctgattccataagtcttatagtttgacattcaagtctgactctggaataccggctagattgtctgagtcactgggcaggggcctggacctggcgaattcactcaggtaaatgccacaaggtaacagcctgtctgcagggccagccagcttaactggactctatcctgtctcattaccctcctccaaacctttgaagtggactttgaatgagaaattcagtcaaaagataacatttccatatcagcgtggcttagatgggcacagacgtagtcagtatagctgaagagtttccttagtcctataaagctggagttgttaattctgtagcataagcagcacattatctttctaggtttggaaaaggcacgttgagaaactttctggaggtgagtagaaacaaagcctcaagtagttacacactccagagtcatgaaagatctgtagatccgcatttatatctcatgccctttttaacagtgaggcttgaacttgccaaaatactacaccctaccttttaagcagtttgatgaaaatcacctgataggaagtgggcgtctctggacacagttgctttgccaacatgtgggtggtggttggtgctaaccaccctgcatgtctggttctctggatggcagtgtaagtgtatccaggttgcctgggctgaaggcatatcagacaaggggagtttgtatgaagagtgccatgcttgttcgtgcctcctgcttttgcacatgactaaaacaacttctctttctctccacctatatgtttcctattgctgctgtaatgatttaccacaaattgaatggcgtaaaacagtacaaatttattgtcataaaggtctagaggccagaaagtccaaaatgtctctggctaggctgtaatcaaggtgttggcagggctatatttctttctagaggctttgggacaaaatctgttttcttgccttttccagtttctaaaggcagcctgcatcccttggctttgtctgcaaagtcagcagccatattcccccagcttctgcttccattctcacatgcctgtctctcactgtcctgcctccctctttcacttataaggacccccgtgattttactgggcccagccagataatccaggttaagtctccccttcacgagagccttaacttggtcacaccttcaaagtcccttttgccatataaggtattcataggttccaaggactaggatgtggacctctttggggacctaccacactccccttctgatcctcataaatgttattgcctgagacagtccactgtttctttccagcccaattagttgtttatgcagtttctgtctttcctcttcgtaccacttttctctctgaagttcttgtttgtgattgtgtgttatttaacttttcgctcctaatacctagcactgtccttgggacatagtgaccccttaatagatctttgctgaataactgtgtggctgtagctgggttctggccgggggcacaaacgccggaagtctgaccagcctcaggatgtgcctccgccagcgtgtaaggcagcagccactagagggaaggcctgtgctttgcaatctggcactctgggttgggacttgcattggctgttacctgtctttgtgaccttgggtaagttacatcatttctttgtgcctcagtttcctcatctttgaaaggtaggataagaaatactacctgggactatatgagaagtaaattatatacttggaatgcagtatttatagtttgtagcgtatcactaagcaaaagtgaaacttctgtgctcttacatgggaaggaagaggtatcaggccatctgacagggaaagaagcagagccatgcaaagttgggagcacagttgtaaaaaggattatttaattttgtgttcctttcagccacaactggtagcacctctaaataaaaggcatatattttgctttgaggttttgcagatgattttatttaggtgcagaacttgtggattccagtcatctttctaggactttgggcaccctgaattgagcaagtcttttactcttcagagacccagctactgcaaaggtccaaatacttagtttcatttaaattttattaaaatggtatacaagtatactaggtatttatcttgggactggaacagttaggtgctatggggacttcactggtatagcctccaccatgacagagcaataagcctgatattattctgagtggcttaggaattagccagccatctcgagcctaatgtggtctgaccttctctggtggtggtgctagatgtagtctcccatagactggtgggctgtttattttcaggatataaataatgtaacctggaattgtggttctgcattgtttccatccgcgaatgtttagcttgttggaacaattgatttgtcggttccagaagcgagtaaactgacctgcgaggaacacttcccctgtaagaagcaatcccttgaaagataaacagtagtgcatctgggagcagataggcggctcttagcacttcaggaatcataaaaacagatgactgtgaaattcttagatttcagtatcctttttctttaaccttttcctttttcatttattttcctttgtggtggtgtttctcatgatgatcctttagaagtgaagccagtatttgtgtggtaatatttccttagtgtactctttaattagatcagtaggcctcccacatagttcaatccaaaggccagagcaaatttagaagctaccaatgtacaaggaaatatttttgaacatgaaagaaacaatttagtaactatgagaataaatggtgtttctgatccaagtactatcatttgcataataataaaatatcagaaaaaaatggaaaattttacagaacagtattaaaatattgggatgaacaggagagaaggtgcaaggagaaagcaagctatggattacgtatcaaatagctacaggacaatgcggttttataatttccttatacacacacatatagaacaactgctttcaagttggaatctacatttaataaatagacgagtgatttctaatcagtatgtgaccatttacaagtaggaagtaattttatgagtccttcaaggtgctcaaaagcagtttagtttaaataattcatatgcagacttacactagtaacctgtacaacagacccttttatagcagttattgaactgcttttgaattggaatctacatttaataaatagacaggaatgatttataattagtatgtgaccacttagtagtaggaagtaattttgtgagtccttcaaggtgctcaaaagcagtttagtttaaataattcatatgcaaatgtatactagtaacctatacaacagacccctttatattactattgcagaaacaaatgtcagattgcacctcgtccaataattttataactacaaattaccccttttatcaccattacaaaggagattgactttctagttacggtaggttaattaaatatcaggaagtcagttttatggcttctaaacttttttgaggggtgaggggaacaaacagccatggtgatcactgtgatgatcagattagccgtgccctagttaagcttgttggtcactgctggcaagaaagtttcagcacaggcagacttgcaatgtgaaggtcatatatgagtgttgttgctctgaaatcggcatgaacctagatagagttcctagagttccaaatctctcattaaggcattacctcccaggacacttggagtaaatatgtctagtgctgagaattcaccttcaagtgacattctcttgaaagacagcatgtcagtttctggaatcagccttaagtggaaacaagttccaagtcctaatggagactaagtgatctttttctcctcattccattgcctaaacaagggaaacctcgggccaagagtcagtgaaagggagagagcaggaggacaagaaggatttggccccagaacatcatcatgatctgggtgtcaggctgcttagctcaaggaaagaattcacagaaaccgctttcctttgagaatgatgctgagttctcaaactgcatttctgataggctggcacattggaagaatgtatttccacaaacacctgcattgcatgctgatgacagtgtacatcctgaaggcttgcttagggactctagggaaaaagtgaatgttattttagttgatgcttcaagtgttgtatttctctgttcaggtaaataataatttaaccaagtcctaagggaaaaaagtaaagttgtcatagctgacataaaaggtagagtttaaagggatgtgacttcatggatatttgtttggtatctagaacgttggcatttgactgagctattttgagacatggttatttcacaccaccattcatggaatcagtgttactgtcttctgtgttcttgggtgcaaagcagccacttatcaccttggctgagtgttttccagtacctaatgagcctcctttttttccaagaaaccaaactctttgtaacaaattatctcccacgttaaaaataaaatatgatacccaatacctcaggattactcattaatggtatgtgaaggaattgagcagatatactgttgtatgttggaaatgctgtcttaaaatctaggtagagaaacaacacacaaataaccaagtaatgctctgtgtaatggaatatgcaccaaatgcagggatggaaaataggcaagagtacaaagaagagtggttgaatctgacagtgcagacggtacaggaacctgtccagaatcagtctcagaacacttaagagtccctctgtgttcagtatatctgccatgaggcccctcatgtgcctgtctctcttcaacaggttggggctcctcgaggccaaagatcataccttaatcatctttgtatccacagcccctcacagggtgaggtatgaccattaaatgagtaaacaaaggcagcatttgaagtgggtccaagagaagttggttaaaaccaaggaagtaggagagttaaaagctaagtcccaggggtgtgagagagggcataagagaggccagcatcctggaggtttggtcacagcatcgtggtgcagatgggttggaggggtggggaagaggagctgctagtctggagctatagcagtcttcctcagatgttttaaagagatgtgtaatgcaagcctaccatcttctgatagtctgtgtcagaaactcagactatcttatttccctagattttttattcaacaaacatttactaagcaaccactgatcacagttgactatgacttggattctgtccttagggagtctcaaagcccaagggaggtagacaaaggccataatgtgattagcaattatagcagtatccacaaggttctgtagaacatggaggagtgacaatgcatgagataatttagagaaggctactgggaggtagtgaggccgggctgcggtctttaaggatgagcaggagtttgactaaataattggctaaatatatcatgatattctatttatatggaataaatagtacgaagtgatctccactaaaaatgtagtgaaggacagactgaagagagactctgcattcattttccatatttattatttgtatttcaagtatttaataattccaataatctttatgtagatcctatagtgacaaaaatggaagaaggaaaaaaagggactgaacagtttacctgtctccatctacagcctaataatctacagctataaagtctttgtgaacattaagctttagcgtctgtattgtcttttttgtttttaatatgctatccagaccaatatccagatagcaatagaatagcctttagacagttacagcgttaaagttttgtccttagatttattttaaataattagatcatattttaggttgggtttctccagaaatggtctctaaaaccaagtattgagtgcaaatagtttatgtggggatgtgatccaggaagccctggttagagacaagggaactgagacagagaagggaagtgtattagtctgttctcgcattgctatgaagagctacctgagattgggtaatttatgaagaaaagaggtttaattgactcatgcttctgcaggctgtacaagcatggctgggaaggcctcaggagacttacaatcatggtggaagaaaaggggaagcagacatgtcttacgttgcccgagaaggaggaagatagagagaagggggaagtgccacacacttttaaacaaccagatcttgtgagaactcacatcaggagaacagcaagggggaagtccaccacaatgatccagtcacctcccaccaggccctcctccaagattggggattgcaatctgacatgagatttgggtggggacacaaatccaaaccgtatcaggaaggaagcccatgcgggggtctatcaataaacaggttacagctgtggccagtcagagcttagtccttataaacacctctggaagatggagtagattttgtaaaacatgcctcagagtagtattttaagaaggttctgggtattttaagtcccagagtcttcggttcaaatgaaatctgaagcagaggctaaaccaaaagtatgaaagcagagcttagagaggtgaaacatctccacatctataatgatattaatcccatatcagcctggtccttggttccagttttccacccattgggttctcctgggaatctgcaggacttcagcgggtattgttggaaaggtattagctttgaagaatgatttgacaccatgcaaggcttgaaaccagatcaaagtacctgtgggtatggcttcttccacataatgtagaaatcatacattcagctttttacttacgttaaaaaaaaattccctcgcatgacattattttactttatggaggacagaatgcaaattgcactggatttggatgaaagttggcattataaggacagatgttgcaagaaccatattttggataccaggactttgaaagagagcaccatataagatgtctttcattgtaattaaactagtttaccttggattaactgtgagccagttttatgccactactaataattctgaaaatgtaaaatggatttgaatacttttgtcccatgtttttcttcctcaggtttctaatattcaggcaagagcagttgtgttgtcctgggctccccctgttggactttcctgtggaccccacagtggtctttccttcccctacagttacgaggtggccttatcagacaaaggacgagatggaaaatacaagataatttacaggttgtgtatgtttctattgtttttctttgctgctaaactgtaaaattggagttgtgaaggaaaatggaaaacaaaggaaaaccttataggcttggcaaattttcctttagtttattttaagatttagtaataattataatgctaagaattcattgtgtccagagtaattcttatttggaaatgagtagcatagagctatttggtatgggtgtaatacatcacttggttatatttgctgtcagtagagtattaatgaaaactttctgttaatgtctgtcggcaaaaggcgattatgacttttagtttttgcatacattgggcgattataaggtgaccgcttatgttttagatccagacctttttgtagccctgttttttaaagttctacaatatgtttccttctgttttaccctatttcttaccttgcacaatagtttccagcctgtaataaagatactttaaaacatttcatttggaggccttaagtggtcaaaagtttggctcacagggaagggattagccccttctgctctgtggactcccaggtattgaccattcaaaagatttataactgtgttctaaatgtgagaaaaattttagggccacgtctttcttctttgtaattactgggtactgctcagatttgcagagcaggaaatcagaaagttagttttgttttaactgcttgtttggcctccctgtgagtggaccctccagtgactgcccgtgcccagggtaataatgtggtcacacaatcctcactttttctgccagagatgtttcttttctcccctattttcctgctgcatcagtgccacagatgcgtatctcccctttcctgttcctaattcttgctccacagacagtcttcctgacaaggaaagagggacagaggttaaggactcaagccctgtggctgctgtgtcctcctcttgctacccaggctacctccactgtctcttccctggacgccctcaggagtctcctgcaggtcttccacccccgactcttgctcttctacaagcttgcctactcactgcagaaacaaactcaggccagatcactgcccttctgataacactccagggattccccactgtatttaggatattcctaactctggctcatcaccgttttattctagtctgaaaaatcagaattagtagcaactttaaagaaatacagagtgccatgtcccccatgcctggcaaggaacagatgcaattgacccttgaacaacacaggtctgaactgcacggacccacttatgcacggattccttgtcagccacatgcagaccagaacaatattcacgggatatgagacctgtggatatgcagggccaactggggacttgagtatgtgtatacgctctgtgggggtggggtcctggtactgattccttgtgtatactgcgggacaactgtggatagagtcttttcatgcaagatgaacattggtggcaggagctagaggctcacgtgcccagagaggctcagcaggtaacatacatgagcaaagtggaaaggctgaaaatgaggtgaacaggagagctcctgttgccatcgaaaggaagcagtcaccactcagcctaagttgattgttgctaaaatttgctgattctttgaattttttttcaaaagatgctgaaaatctgaattattatacaaacttccctgttattaaattaatggaacaaatgcaagatattttaaagatacaatgtaggccagacaacagagcttcaggcaaggtctggacacagcttccagttttcaacttaaaacccagccttttatttggaatagtttcaaacttataagatgtccccaaaatagagaaatcaaggaatacctatatactccatatccagattcacttgttattaactttatactctgctttatcatttgaactccttcctcttttcctctttctgtcctcaatccacatttttttccataagtgttttttttttgagacagagtcttgctctgtcgcccaggctggagtgcagtggcactatcttggctcactgcaagctccgcctcctgggttcacgccattctcctgcctcagcctcctgagtaggtaggattacaggtgcccgccaccacgcccggctaattttttgtatttttagtagagacggggtttcaccgtgttagccaggatggtctcgatctcctgacctcgtgatccgccctccttggcctcccaaagtgctcggataacaggcgtgagccaccgcgcccggccttttttttcataagttttatatgtaatggtcccttactacaaaatacttcaggatatttcctataagaatttttttaaagaaccacagtgtaattataacttcataaacttacattgatatgatacttttatctgttgtctatattccagcttttgtcgcttggtctataaataatgcctgttatattttgaaaaattgggcagttttcaccccttcccgcgcaggagctagtctagggtcatacagtacctttagttgtcatgtctctttagccttctttaatttggaacaattccacaatatttcttatacttttatgacactgatatttttgaagaacacaaagtaagtcacatgcacacacacctttaacctttttaaaaattttcaatagaacattccttattttggttggttacttcctcatgatttaaggtgaggttcagttgcaacttttgaggacataaatggttttattttattgaagagagctatttgttcggtgcattggtaagtgaggaagtgagattgtgatttttcttaagacagtccagagttgagataattgaggttcctgccaaggtaagtgtggaaagtgccttctgttaacagctggtatgatcatttttattcatttgtttgttcattcattcatttgcttacttagttacttatatgtatttactcgtaagaagtgataagatcttttagaattttattagtaagttaaccatgccattttcgagatctaagatggcatcattaaaaagaacctgattttctagtcccaaacaaataataatatcaaataagaaagtttatttctggtttatggtggaatctgacataatagttcatgaattattgtcagtacattactggacacccaaattccaaatctcgtttgcttttgaaactggaattagcaactaatgaatgctttttctttacagtggagaagaattagaatgtaacctgaaagatcttagaccagcaacagattatcatgtgaggtgagttaggatataagagccaaactgtattggagaatccaggtggctaaagcaaaaacatgtactcccttttaagtttttggtgaatgttgcttaccttgctgaaagttgtagaaccatggcttatgggccattcattgactctcaagagcatcgtaactgggaagacacagaagcgcttctgtgaacagaaaagtaggtgttaaacactgaaaatcattttaaacattttaaaagtaattttacatggtcttctaagatctattggactatggtttaacagtttctttctgtaaaacaaatgaaacttttgtcaccatgggcatatcattgtttcttatagaccatcatataaactgtttattcagaccaaatgactgaagaagccctttccatgttgcaagcacaccgttagaccttaaaagctggtagattttgaaaaagacaagtaatacaagcatcaaattatctctgatgagaattaactcaatttggctaaacagttaacccatgtggcatagtatgtagcctgaaatctctcctgtgattttctggaatctctactgtgactactctggaaggtagggctagcttattttaggaagaaacccagccaaccacagatctgtaaggaggaaagtgttatctgaattttttagagagaccatctgattatttaaagatacatccatctatttatttgccaataagaaggtctgaatatgacccataacactaaaaaaacttttttttaatctttattttatctaatatttaagttccccagaaaatatagttttatttaactggatgtacaacaacacattgtttcccttttttttttcaattatatatgcatacataaagattgcagaataaaattgtaagcatgaaatatacatctattactatactttccaaaggttaatttacatcatgagtttctttgtgatttcgggatgaggttggaggcaaggtagcctagtaggaagagcgtatatgaattaccaggaggcttgagtgtgagtctggttctgccctgaacgggctgttttaactttggtcaattcacatagaacgctctgccatgattttctcagttaaaaaaaaggtagtaaagcaaggatgtgcgttgaggatgtaatatcttattagctgcataagttcttaaaaataagtttaaagtaatgtatatcagagtaagttgttttgttttaaggcataaagtgcacatctgctcagctatcatattgtttagatgagctctcttgcaaccatctcctcctgtttaaatcaaaactttggattttgagtcaattagcttccgcccaaacgtattgagcttttcacacactctgtacaagaagatctgtgtaatttgtgaagctaagatgataatagaaatggtttaaccattattcaaaatggtcaatttaacaacaaaccagaaaatgtaaaaccagaaaatgtaaaagtcatgtaaatgttatctattattcattgttaacatatgtttctttctgctccgtgctttaacagtttattgttcctgtggttagtaaaggtttactttattaatttcctgctcattcatgagcttacaatatcctttttaagaaacttaaatgttatgaagagtcttctctttatttaccatcctgtctgttgttccatttattttttttttaaacccttattacaaagggtaaatttgagaacacttgctcatcagctatttttaccgacaaaacctatgaacatcttgaacttctgggcagatagaatagttaatggattccccaaaaggaacaggatgggagcatgacgtggttaccatctaggggccttgggtctagactttctcctgacacatttgggactccttgcatttggtatttgacacacatgtgacaccaaacacgtacaacctagggtgccaccaactgttatttgttctacctctctgctttccaggaagataggaagttctctctccttggggatggtcaattttagtatttttttaacatcctttctctcctaataaaaacgtctatagtccagatttagtctttgtgcactgcctaatgcacagtccatatagatcatacgttctttttccttttacagtcttgtcttttttaggctagagaagaatcttaacacttgcaactcttatttagatgtagcttcctctgccttgaattgcttcggtgaagcagcatgatgcatagtggacatggcttgcaacttgaagttaatggctctgtcatttactaagggtgtgtacttaagcgagccattgaaacttctttggtctcgctttgtcatgtataaaatgagaatgataatgataccagcctcaggaaaataggatgagagcaaatatatgtgcaaatctattttagacctgtaaagtcatgtataagtgctaccttttggttttcccaagctcgttgcagtttttccaagctgtgaaaataaaaaggacttaatgatgcaagttctttgaatctgtatatagtttgatcatatcactcacatttttattgagatgaagatgtattttacttgacactgaaaacaaggagcaaaatctctttttacagtccagttaataatcttagttctgggaatgtaagcttttatcatgtagagtggccgcaaatattttaaatgtagcagtcacctataaggcctcaaaaggccgtgtggaaatagtttcttcactaaattttcataacagcaactacagaagaatttcattactggacagctgcaaaataaacaattacgctgagtgcagtggctcacacctgtaatctcagcattttgagaggtcgagagaatgacttgagcccaggagttcaagactagcccaggcaacataatgagaccttgtctctacaaaaaatgaaaaattagctgggtatggtgatgtatgcccgtggtcccagctactgaggagactgaggtgagaggatcgcttgagcagaggggttgaggctgtagtgagccctgattgcagctgctgcactccagcctgggcaacagcaggagaccttgtctctaaataaataaataaataagtgaataaattccttgccatttttgtttgtgcattaccaatttagaaagtgatggaagtctgtagagccagttatgaaaactgagatatttcttttagcagcacaaaacaaggtacattttttcttccaactcttaatattgcaacattttgattaaaagtgtaagatttctgtcttaaatcatgtactgaagtctcacctagacttctgttcttgtattccttgttacttttcattttgctactctgagtctatcttattcacattgattgcttgatatcttcatataatgctttttctcattttcaactcccccggcccatgcccgcccccatattagtattattgcatgagttcacccatcagacacacaaaccttcttctttttcaatagcagtctcagtcatgaagccctgtcatttaactgcctggtagttgccttcagttactaggccagaacagctctttccaccaactcactgttactgggaatatattgagactagtggcatcctttagacagtgctgtagctcacatgcctgtggctgctccagttggcatctgacatgccatttgagccagattccacatggaaaattatattccaagacatttcaggtttacaaaatgtttcttcttttccacttttactatgaggttttgtgtatcattcttacacgtctgttcagtcactattctttttttctcctaatctcctagtggtgattgaggaagataatacccctctatgatgcatacattgattagcaaaatttaggaagacctttattaaaatcactttcatatttgttaccctattcttaacacaaataaatttttttggtttaatgttcatacaatatttcaaaggaatccatttgtaattgtcaagattattcagtgcttctgtaaagggcattgtgttatgtattgtataaagccactaataaaaaatctcctgtctctgtgtgtgtatgtgtgagagagagagagagagagtgtgtgtgtgtgcatgtgtgtgagagtgtgtgtttgtgtgtgcctgagagagagagacagagacagagagacaagagattgtgtggagaaatgagaaaaatccaatatgtaaataaattgcattatattttaaatacttatatatatataaatatgtaattttacaaacatgaacatttatacatatatacatttatttgtacaaataaatatgtatacatacacaaatgtatgctgtgtatgcatctgccagagaagtatatttgtcttttaattggtagttctataattaataatggcattacaatgaccattttactgcgggagtcaacaatttatatctttatcagcgataggataatcagtaatttgagtgatggaatggatagcaatttcatgaaaattttgaagcagttttctagtcatccgcctaaacaatttggcaaacaagttgcccagagatgatatcatataatgacatttcccagaaaaattgtgcaatgaaacatttccaaaaatatggttgacaagcacagtgaaggattataaaatacatgttattgaccaaaaactgtggctcctagtatgttacatcgtgctagaaaaagttggaggcatacttctgaaattcttggagcacctgtttcctaagcatttagccaggatttaagctgaaacaaatgtgaaaacaagattaattatattgttagaaaaatgttttcttttcttgggataaatgcaacaaaaactgaactgtttgctgacttatttaacccaagaaactgaccgtactctacagatactccttttacatgatgatatttatggaaaactcattgccattatgtggaaaaaaaaaaaattgcagtattcttttaaaatgtagcatcattagcagagatttttcttttctataaaagttattggtaaaaatgttgctagtcactataacagtaagttgctgtccatttactgaactactataattgacagatgtaatcaagggatacttaagtgtggtgccaatttttgtactatatgcagcatacttacattgccatgcaaaatggctgacaaaatattatgtgtgaaaagcattgacccttagcataacattgtttaagattaaaggcaagaaaaatagccaactccatctggcccatacaactgtctgttttcaacaacctcaaatttctaacctgcatcaggttcttttacttttatcctcactgccatcctcccagcctggccaccaggagtctccatcacttacgactctccagcctaggaagtatggattgctgcctccaagaatcccactaaaaatgaacaaagaatttactgagaccaaatttacctttccccagacaactgactgcatcctgctagtactttgcaggctgtttccctgccttcctccctctgctctattatccagatggatttttggcggtggctgtttttgggaacatataggacctgatctgcctgggtatacttctgcatttgtaggcaaatgcccagtcattgcaaactgacatacttactgggtggaggcagagaacctaaacagctaaactgggttgggtaagggtcagctgaaaagcagtctcagtgctgtggagacagtaggaatgatggggactctagcgaactctgcagcacctgctccatctaaagcggggagctgcccacagatttagctcattactacagggcaggaaagagggccgagtgaggccaggtgcagtggctcacgcctgtaatcccagcactttgggaggccaaggtgggtggatcacctgaggtcaggtgttcaagaccagcctggccaacgtggtgaaacccccatctctacaaaaatacaaaaatcagtcaggcatgatggcaagtgcctgtaatcccagccactcagggggccgaggcaggagactcacttgaacctgggaggcagaggttgcagtaagctgagatcatgccattgcaccccagcctaggcgacagagcgagacttcatctgaaaaaaaaaaaaaaaaagccaagtgttgctaaaaccttgagtttttaagagaagccagaagtttggtttttaaaatgagagcgctccagatatttttcagtgaaggcttaatttttacttttttatttcagaaaatgttagatatagtcagaagtagatagtagtttagatagtagtagtttaatgaactctcatcactcaacttctgttacctcattgtcctcacttacctctcccctgccctgatgattttgaagtaaggttcagacatcatattatttcacctataaactatattaccatcatcacacacacctgaaatgtcttcacaatcccgggactgttcccatttcctcagttctaagaatgaagattttgtttctttagtttgttgtaattggaattcaaatgtgtgaatatgtggtttggttgatatgtcttaaatatattttaatccattcatttttccctttatctttttctctttcttgcaacttgtttgttagattaatttgtttgtcctgtagagtcttccacaagtatgagtttggctgactgcatccgtgttgtgttgcttaatattgttctcctgtcctctatatttcccataaagcaatgaagaggtttaatcagatacaggttcagtttttctgccaagacagttttgtaggtagtgacatagtcctttattaggaatgcatggtgtctggttgtctctttttgtgatggtcattgcctgtatcttttaattcataggtggctctaatacttcaaaacattatgtttttgcacactgccaccacacatacacatgtgtcttgggtcagatgcaacccatgagtcacctgttggagaattctgtgtatcaaagttcaggcttgagccctgcccatgtctggaacatgttgtgattcatttaaagtaacttactcccagtgagcccatcctgacacagggaaatgatcttaccagatctaccatttagttttatattatcacgtgcctacttacagtgcgtgcaaaaaggaccttttccttcatcaggggttgggtggagagcatcccaatgataagcattatttgtttggatcaaatttcatgctgtcctcccataaggcaaatagatcaaatatgtaatatgtatgtatttttatcttttgaggtacaaagtagacatatctattagtgcctttgacgtatggcctctatgaatttttcatgatggactttgtggagaaatgactttgcaaatcacacacacacttgggacctatcttccataatgttgttatctttacctgttgtttgtgttcattgggtagggctaagggaagtggattgtggtgtttagaggaacatgattgcaggatgaacaaggggaataggcaataccgtatatactggttagacttccagggataaataccattgatccaaatttctaactgtgtggccttgggaaatgtacttcatctctgtgtttccttctgtctgcaatgggtaataagatttccctacctcagagagggtggctataagaattaagggctcaatatctatttgccaactctgtgaatagtttaatccttgcatctgttttaggcagcaaagtgttctttgttgttgttgttttttaagagtacattttcaattttgaaaaaataaattcccagtataaaaaatggaatagtaggaagatgataaaaatcagcatagccctattttatgctatttgaagagtgtggcattaatagtatgttctatgctttttcttcatggcttctctggagaaatcaagcacatatgttgcagtgttgagccaaacattttagtgtacagaccgaacatctttaatcttggcttcatgtataagagttaaatattcacgtggattaaactgtacctgaacattgtttttgtggaattagagaaagtcacacttgttagcttctctgtgaaacatccctagttttacataaatgtgtacagtattaaatgtagttcaaagatggtatctaccctgtttgtacttttatgctttctctccagtctgtgacctcttattactgtttcttttgcctttttatccagctcttaactcttagcctttttccagataaagtcaaccagagagtagctcatggggttttagaacatatatttggagatcgttctggggttaaggtttattttcttacttagaataatctcttctagtcagtagatcctgcctatcttgaaatggagctgggtggcacacactgagacaaatacctgttgggatgactgtcccctgttaatgctaaccataggtcaggacaagaccaacagataagagcaagagcatgatactcactccgtaagaaattctgttcatctacagaaagccttagggtgaaacaaagataagaatcctggtcttctatgatgagtcactgccactgactgtgtctgttttgttttcagggtgtatgccatgtacaattccgtaaagggatcctgctccgagcctgttagcttcaccacccacagctgtgcacccgagtgtcctttcccccctaagctggcacataggagcaaaagttcactaaccctgcagtggaaggtgggtagctcaaagcatcaagaatcgtctcaatttaaaaattagccaggtgtggtggcaacgtgttcctagtcccagctacctgggaggctgaggaggggggatcacttgaacccaggagtttcaaggctgcagtgagccatgatcacgccactgcactccaccctgggcaacagagaaagagtctcgagttaatataaggtcagtctatagccatttgaaatattttttagcacgactccagtcttgtgatatgtttggttttctgcatagtaagtatgtgcaaccaactgttatatcaaaagttgtcatttctgtaagagttgggcaaaggggtgggaggagggaactgcaaaatctagctttagcttttttttgcagcagtattttctaaatgtcttcaggtcataagcaacacgtataagtgatataggtacttaaaatacctacatcttatcactttctaatagtctagctcatttcaacaaacatttgaggactttagcaaaaagtttttatcaagaaagattcagagataaagtagttttatggcccttttggcacatttcagtggtgatactgaaatgtttaatacataaaacaacctagaacatttagtgatctaaactatgttagtacttcattaagtttcactacttaggccatacaccagtcaggattactaattatttaagaaaaaaagactgaattatatattttcatgaaacacaattcactggctaaaattagctgttaccaaagagagatcatattgccccttcctcaagaggcatcactagcttgttaatcatagttgtgtgtttgtgagaaaacagtagattgttatcaatctctatagcagttatttctctacatcaatattttaaaatataatttaaaatgtaaaatagatggaggtagagataaagatttagggtttggggggagaatagtaatgtgtgaaagaaagaaaatggctaggaagatccattattagtgaagaaatattttatcttttcatttctggcccagagagtcaggttggtctagggagctgatgaaagcaattgagagtagtggttagcagcaaagcatgggcctcagttgatccctcttaggtgggcagctgcattctcatagccagtggccagcattgagtgtgttacttggacagaagcaaagtttaaactggcttagaatctgaactattttattttccttcctggcttccagggataatccaggtcagtgattccccaccttttcagagttttaacacccaactggcatcattgtttaattccttagagtatacacatccatttaaaaaatgtgctctatatttacacatacatatgtaaatatatctttgtaaggaaagaattaaaatccattttgtttggaaaatataagaactcatctttagatgacctgagggatcccggggtcttataaacctaaagttgggaatcactgatgcatactctgcttaaaacctggatgaatttcaggtctcaggcagaccagcaacttcaagaaagaattttcttattaggaggaaaacgtttcacattttctttctccctttcctcaattgtaaatcagaaacatactcttgttccattcagtcatgtacaaacttgaaagttctggatttagttcagttttcatttaaatgtccttagaacagattccctgatcaaagtgctccaggtgggggcacaaggacaggggaacattctctggctgccagtctgtccttgaatccacaaagacgctgaaagcactaaagatctgacatctttttgttcgtcagcaacagttattacttacacaggagataaggcaaaacaaaaacctaagtcagtgtacccaccctcaaggaattaagggactagtagtggggtaggatatcatcaaagaaactaccaaagaacagtttttttttgagttctcatcttagagatgggttctcatcttagagaactttgattttgtcagttgtttataactttaagtgcatcactatcctctcctccagattgagcctgcaagagcctaaaataacagtttaggacttagagcactcacctgagatccgagttttgggactcagagattgtgtgactctaaagagagaaggaagggaaggagagggagaagaatttcattattaatttaactaccatttactgggcccctgaggttttattactaaccataatagagcaataacaactgtttactgagtgcttcctataaaactgggtagtttagtaggtgatttacatattctcccaattatttatcatacctatctattcttggaacatgaaattagttgttgatattgatattaaacagctagcaccagaccacatgcgacaaacagccaaggtaggattcagatacatctcaggggaagctgagctgccttttgccaggggtaaggcactgtgctgtttgttaggctcttgctctttcctagggaagagtcggccctggcatgtttttgaagtgggagacacgatccgactcctcttcctggttgcttcccccaacttgtagttccactgtctctctagatctgtctaccctaatgctccaagagaccccactgcggcatcacctgtagctcttggaatcctgaaaagcattcttttctccagagttctttacttcccttcccattgttaaaaacccactttctcagtgaagcagatctcagcatgctttttaagaggaaagcaaatgatgaaacttccctctgctaacgtatgaaggatgaatagcctctagtcatctatccagaggatcacattttttccccattttttaaaaagaggaaccttaatgtcgctgatggctttctaatcttaagtacttttaaaaaattaaaaagctgtatgtgggatgttataaaaagaaaggcttgactgtgctccaccagacctccagcagtgcctgtgtttctcagctgccttgttctcactctacgcttgaattcaaagtccctcttcaaagtcctatccccagaggaagtagcgtaccatgagggtgtaaaaagggagaggtggtggtggtggtaggtaggtttggctatttgtggagtatgatttattcatagtggggactctctctactgttgaggtatgtcaaagttagtgtatgatgatgattgaccaaggaacgcaggaaccatcagctttatccccctgaggggagagcacaggactatcatagacactgtatgtgagccaggtgggtaactcataagttttgtctgtgaacaactttctctaatctcatgttactattttttttaggcaccaattgacaacggttcaaaaatcaccaactaccttttagagtgggatgaggtaagcttattttcatattcacccatctaaaacaccatttcaaaaacaaaattaactgaacaaatgccatcttattcttttataagacatgctaaacacagaaaaaaggaatgctagtagagaaatttaaatcaatagttattgactatggaaaatgaagttagattgaagtagtattatgagttgtgtattgaaatatatgtacctggcttatttgcaagcactactgctgaaagaaaaaaagtggggtcttatctattttggatctccagtgtctagccagccaataatttgtattaaaaattgactgctttgtcatcttgactgctcagatgattttgataaggtaaaacacactgccgcttggaaagcataatttgcttttcctttttgaatgccatgtatgtactttggtgttacactgttgagtggcctctgtgagagcagagcagtacatagaagtcacattctacccatgtgcgagtgccctgtgggttagaatgtcctgtatcggatgccccccttgctgttcatgtcaccagaggcccttggaaggtatctacggtggagtgtccttattctcaaagccactgtgtgccaactggtggacccagtgcatttctggcctagctaactctacacacagaatctcaggcaggaaacacttgacctagaagcctttcatttctaaaaagcaactgtaggtcgggcgcgatgactcacgcctgtaatcccagcactttgggaggccaaggcaggtggatcacgaggtcaggagatcaagaccatcctggctaacacgatgaaacaccgtctctactaaaaatacaaaaaaaaaaaaaaaaaattagccgggcgtagtggcgggcgcctgtagtcccagctactcgggaggctgaggcaggagaatgctgtgaacccaggaggcagagcttgcagtgagccgagatcgcaccactgcactctagcctgggcgacagagcaagactccgtctcaaaaagaaaaaaaaaaaaaagcaactgtactttttgttcctgtagatcttaattgtatttattcatttgcccccactttatgctttctctggttgagaaattggctaaggattttaagaataagaaatgtggaatttggggagaaatgcaagttagctagccttcgtgacttaaatttggagagattgaaagatttagaacttaggcaaaaaatgacttggcaagtatggaaaaatattttaaccaaatgtaaaatgaaaactggatggaattcccatgatgaaattttgatgtgaaagagaggtccgtcatcactttctgcagaagcatattttcccatctgggttgcatctgaacagctagagttccaagttacccagaacaaccgtctgttgttcttaggatcgtttcgaatagcttgtacatgcaggttggtaaaatctcagccttaacccgtacattctacagattaggtggatttcattttaaggtggttaattagaaagtgaaaccacctctccagcccttagaggtttttatagtcagtcaggaatgttggaaagaaactcgaatgacctgtgagcatatagtaacatcttcccatctcttcctctttgtaaggacaggtgaccgtttaatgaaagtctctttttatatgttgatttgttgcactcaccttgttttttctcatgtctcgaggttcaccagtacagaaaaggcattttttttttcagttatcttcttagggcactgtgtgtgtatgtgcgtgcgtgcatgcacacactcgtgcatgcatatgaatcctgtgtttttttactgcttctctgcctaagaccgtgagttcctaagttaaggaaggccaaaaaagttgaatacatacctcagtgggaaacctccaaagaaaactcgggtgctgcaggaaatggtaactcagttaccattgctcagttcctcatcccttcccttagaatttgaagtgagagtgtcgtagctgatgatgctgagaggaaggatgccacagcctctgctgaaacaggacaggccacgtctgatgactttttatgttcagcatggtccattacaggctagcggtcaaaaaatgttaaatggctgagttttgccctctacctttctcctacttgatctccttccagcttttcctctcacttttcttaattcccttccctcttctttcccctttttctctcccaccttcaaattcctgctggtatcagctctgttgagctttgctgaagattccaggttaatcgactctcatccaccatggatcttttgccaacacaggaatccttttacattctgtggcttcatgtccactttctagacatctcctgccccctcaattctaaggcactcccttgcctttgggtgcaacgagcttcctggcaggagaggataattgaaggaacaccaagattaggaaatatgggttctgttctgagttttatgctgggcagcttgacctctctggtccttagttttttccatctgtgaaatggtgaatagattagttcaccagcttgtgtgcatttacattatttatgctctcacaaaacagattatttaggattgtctcttctgacaagagaatatttggaatcattttcactgttcattaattatttcagcatttatggagtgtgctcctcagtagtccacattgcacattgtcctgtgagggatctgtgacgtagtaaagataactgtgatagctgtgatagctgaaaaagcaaacgtacgcctatcctcttgtgcttttaagcagacacaaataaaacacgttgccatatgcttctcaaattgttctgtccagtagcttctttgctttgtattatacccctctcatttcccatccccttataaagatgaaaaaatggtgctatcgggtttcctggcaatgagaattcaagcagtagtaacaagttcattcctgcccatcctgtcatttcagaagtgaagtttctgacagaacagtctggcagtctgtgtttctaaatttagagctaagttgaggatcagtagcactcttgagagtagctcacttgggttggtctttgggtcccacattcctatgctatacaggccttagcttcaagaaggaaacaggagaacggcatctggtctgtaggaagtgtgaacacataaggctctggccatccctctgaatccttctgctggtagtttctacagccaggtgcatctctttggtaccaggactgtttccagactctgccttaatagaaggcagtgaggcaggagaatgggaagtggatgttttgctggaatcaccctttccccacccctcccctctctaagagccacagctctcccctcctctcctcttcaaggatatctgctccagccacacacccataaacctgtctgccatccagggggctgaagaaacaaacttagattgcagaaagtttttgaggtgcacagagacacaaatcactgcctgagagtgagacagtgctgctcagagtcttgaagaaggttgtgttcaggcatagcactcttccctgtctctgctctggcacctggtctgagaatcatgactttgaggtgaggttgcctcatctccatatatgcaaccactaatgtccaggtatcccctgcagccccatatttttattacagtataacagcatggattagagttccagaatactttagtcttttgttgtttgtaatcacctttgcaataaaatgagtagagtaaaattttgaaagtgttggttaaacaagaagacagggcatcaagcccagctttcaagcctcttaaaaaaagacttgcatggaaaaagagcagcagcctttatttctgctgagattaggaatgctgtgccgagttgaccttcatgggaagatccaccttaatcagcagctaactatatgctgggctctgaagtacaagggcaggtggaaccctaatggggagcagaaaacagaaacgcattacagtacaggggaaatctgatccaccatctctcctctcttaaattcactgtcattaattttgcatcactgtagcatagaattcacttggaaattactcattaatagttctatactagggttaactgcctgttatttctccattaataactaactagacaacatcttaatttttaaatcaatacaagaagttactatgactatgaaatggtaattagcagctaaaaacggaatttacagccgggcgcggtggctcacgcctgtaatcctagcactttgggaggcccagacgggtggattgcctgagctcaggagttcgagaccagcctgggcaacacggtgaaacctcgtctctactaaaatacaaaaaattagctgggcatgacagtgggcgcctatagtcccagctacttgggaggctgaggcaggagaattgctagaacccgggaagcagaggttgcagtgagccaagattgcaccactgcgctccagcctgggcgacagagcgagacttgtctctgaaaagaaaaaaaaggaatttacaggtgtcattggcttttcagctgtggccttcagtttcgattttcacctgaaacaggtcagtttttattacttgagaaggtgtggccattccttgccaagttcccttgtggtgactcgtgagctttagtgtttagagccatggggtttaataactgaccccgcatttttgtagatttttagccgctttcctccttcaggagacaccccattaggagcagaaaggcagaaggtcattttcaagtctttttcacttgaacgttagatgagtcacatcacatttttatttcagtgtccccgcccccgtgtttacactttaatctacaagcacttgtcattctgatgggtagcagaaagcagatcagaagctcctaaaaaggagcttggttaacagcaaaacaatgactagatgctagatttttcaaggtataggttctttccacaatggagagtcagtgagagggggaaggcggacaccatgcttgagacactatacccgttggccgcacccacactaatccctttgactgcccatcttttttgggcacccttccaagctacattgaccctgcattgcttctcttttccttcttctttcttcttcttttttttttttttttttttttttgagatggagttttactcttgttgcccaggctggagtgcaacggcacaatctcagctcactgcaacctctgtctctcaggttcaagcgattcccctgcctcggccactcgagcagctgagattacaggcgtctgccaccacacccagctaatttttatatttttagtatgtttcaccatgttggccaggatggtctccaactcctgacctcaggtgatcacccagctcagtttcccaaagtgctgggattacaggtgtgagccaccatgcccagccctgcttcttttcttgatgacatatcactatctagcagaggtgggagtttttctctagaagaagctatgggagaaggattgaggatatagagggctctaggttagggaagggcttttaggaaaaaaaaaactaggaacctctgggttgagtcattcataaatgtctgcccagtctgttttaatgttcctaaacagatcgtgatctggccttattcttgaaaacttgagtaaaggagtgaattttaatgggcaaataagaactttttattttagaaaaaattagttacataaagaaagtatttatgcaaagttggcttgttttaagttctgccttaagatattgttttaatttgaaccatacagaacactaactggtgctgctgcagctgtcagaacaaatacaggtcacctaagatcttgctatgaatatgtggcatggattcatattgatgatatatatcaatgatatgatgtttatctaaagaaacctgaattaatcgtctcagctttgtctctgtcttcatccattttgtgctgctgtaacagaatacctgagactggttactttataaagaacagagatgtatttcttacagttctgcaagctgggaagttcaaggtcaaggacttgtatctggcaagggccttcttgctgtgtcctcccataatagaagacaggagggcaagacagcgcaagcgtgagagagggaagggaaccaaactcgtctttttatcaggaacccactcctgtgataacaaactcactcctgtcaaaatggcaatgcatttgtgaggatagagcccttgtgacctaatcaccttttcaaggaaaaaaaaatgaccacctctcaacatgttgcattggggattaattttctttttctttttttcttttttttttttgagacagagtcttgctctgtcgcccaggctggagtgcagtggtgcgatctcagctcactgcaacgtctgcctcccgggttcacgcctttctcctgcctcagcctcccgagtaactgggactacaggcgcctgccaccacgcccagctaatttttttgtatttttaatagagacggggtttcaccatgttagccagcatggtctcgatctcctgacctcgtgatccgcctgcctcggcctcccaaagtgctgggattacaggcgtgagccaccacgcccggccggggattaattttctaacacataaacatgggggacacattcaaaccataacagtttctagttactcatggtataccccaagcaggtaatttaacgccttagcctcggcctttccactggaaaaacagtgtcagttatctcacgggtacgtaagactgaatgagataagttggacaacagccgattcagtgtaacgattgttccatattgttgatataagtttacctaagcagatgctaagatctgagatagggacagtcaacaattagaacaatcatgtataaggaatatgacattcttctgtcaggaacttaaacaagagccctgaggtttatgtcacttgtttgaactaaataaaaactgatgttagtgctatcgatggatgttaacttgctattagcctaacttctggacatgacatgcagggcacagaataaccagaaaaagcactttgtgggaatgtgactactggagtccccaaaaaccttcctcacttgtgacccagctagcccaaaaggaagttcacatctggatacacagaataaccagaaaaagagctttgtgggaatgtgactactggagttcccaaaaaccttccttactcatgactcagctagcccaaaaggaagttcacatttggtttccctggtgactaatgagccaacacagctgtaaaacacagtggactaagaatgaaacagatgccacagaaatcaggggaagcataattaaaagttgagagaggagaaaaggccagcagccggtagaacccatgcccctggggagccattagcaggtcaggccaggccaggcaggcccagcagtcctgtcacagaaacctcctgaagcaggtggccagccccagattgcagcttcttggacttctgtatcattcaggaggagccttgtttagggattgagttggccccgtagaagataatcagtaagagatcaattaatcagactcctgcttagctcaagtgttgaatagttcatatggatgatctctcataatccttctgagtgaatttgcacaaaccttttctggttagataacaactgttctgagaatgaagggaatggagcagctacaagcacagtaattaactaggtcccacagcatggatgaagagagccccctgagaatttgcttgactccagctctctaaggtgccacactgccttagggtggacagtgtgttggttggtttcatgacaaaagccaggaaggtcagctttcattcccctgcccaggcccacatgcactttggtcattcttggcaactgtggggattggaaagtggggttctaagttcattttggctctgtccatcagagaccatctttcacatgagtgcccactgccatgtcttacggttgtttcagaaagccaagagaattgctgccccactatagctgctattgaaggaaactaagccaggaaggattgaataactcagaggcatctttaggtgccacttcatgattaaaaggagccccctcttttagggacctcagtctcagagatccacacacctgtagcagattctctgccttctctcttttaccatttctcgcatgtgtacatgatgaggttgtgtgtttgggaagcaaacttgatgtggagcttcttgctgaggctaaattataaatctcctcttggttcctgacacctgatttatcaactcgcctttgtcatggcttctcatcgtgagctggaagaagactgccttgggccttcactaggtggatggaccaaccccatccatcccttggttcatttgtaaattgtactaacagtctgttctgaaattaggccctcggctcccttgctcccccttccctgagacagtcttaacacatcgatcctctcaaagcatttgaaaacagatgaacctcaatatttggagaaatacataggaaaattttctttgtgtgtttgtttaaaccagaagacctagtgatcatccttggctatttcaggcagccaagcctcccctcttacagaaaagctagtgtgctgagggataaaatgcctccctgtttatttggtaacatggaaccacaaatcatcccacccacttttcttacctttgaaacatcctctgtgccagagcgtgcaataaaatgaaagaggcgtccctgggggaagagtggggtttggcacgaggaacttctgagtccacccaaatgcagagtgtccctccctccctgttaggagcctcttatatatggttatgctgaacacatacgtgctcttttatttctgaagccaacattggtctttgatgttgcctaggatcagccggtgctggaacagcttctaaatatagacactctagcagactaaatcttagagtctggccgtagttcagttggccagtgcaactttattttttatgtattgttgccgtttctgacaggttgaactatactattaacagagaatggccagcccagaatccttcagcccatgtctggattcagcagccatgggccacaagcacgtgacaactgataaccaaattcatggaacttatttagcagacagtcatcaaacctggtaagagcagctcaggaaggcagcaggcatggctgtggaagaatctgaaagaggccgggctcagtggctgacacctgtaaccccagtactttgggaggccgaggcaggtggatcacctgaggtcaggagtttgagaccagcctgaccaacatggtgaaaccctgtctctactaaaaatacaaaaattagccgggcatggtggcgcactcctgtaatcccagttgcttgggaggctgaggcaggagaatcgcttgaacctgggaggcggaggttgaggtgagccgagatcattccactgcactccagcctgggtgacagggtgagactctgactcaaaaaaaacaaaaaaatctgaaagagaaggaggacagtggaaagataccacacatcaagaaaacatcaggaggagtaagtcacaagaccaaagggagaaagttcaccatgaattccagcatccttgtgttggccattcttaatcttgtgccaggaatgaagcagttataaagaggaacaggaagtatcgtttccaatctattaatttaaaagcagttgaaaatatcagccagcttcatctgttagtgccagcggtgttggaaatacccacttctagtgttgttagtgccagggtaattagaaatgttagtcagggcagccacagcccccacagtctacagaattacactggcaggaaaacactgtagcctgaattaattgggatgtgtgtgagttacatgtatagaatgagccatgagttgtgttccttaatgggaaaccagcccatttagaggattcatcttcccaagtactgaggaaagctttatgaggatactaagttagtaaagaagaaaaattaacttgaaaaagttcttttgttgttgttttcagtctttcaactacacacttttacaaatcaacacaacaaatatatttttaaacatactctaaatattagttgcattttatgatcttaatcaaatactttttatatacttagctgccagttttcaagtaggtagaccatctgtaaatttgtttcttcactggaactcttgtatgtttgtaaacagatacccagagagagaggtggaaagctggttacatgaggaagtcctttgaaatgttcttttctttgttgactcctgtggttttaggctatgtcatacctaaactgtcccctagagaccattgcgtgtctggatttaaaaatctcccaagagttctctaagtttgggatagcattattaaaagtcttatttcaatctaaaatgtgattctgtaagatgaagtaactgcatagctgttgattggcaattttggttgatctttatcgtctaggagtctggttctatttttagcttatacaaaaataacttttaaaattattcagagaggtccttactttggtggatggctttgaaagaaaaggcatgtactaagtgcatgtagaaaataggacccatcatatgttacacatttattttgcttttgtttttgttttgttttgttttgttttgagacagggtcttgctctgttgcccaggctggagtgcagtggcacagtctcggctcactacagcgtctgcctcccgggtgcaagcaattctcctgcctcagcctcctgagtagctgggattacaggcatgcaccaccacacccggctaattattgtatttttgtatttttatttttttatgtttattatttatttattttttataaattttttttagtagagatggggtttcaccatattggccaggctggtctcaaactcctgacctcaggtgatccacccgcctcggcctcccaaagtgccgggattacaggcgtgagccaccatgcccagccagacatttattttgtatgctagcatgcacattacattcccccaccttctagctgtttacagtgtaggaggaatttataaaagtttgcagaaattcagaggggtaaaacttcatgctataaacgtatatagacttcaaaatagatgagtgtaatattgcataacaaattaccccaaaacttagaggcttcaaacaatcactttcttatgcttgtggactctgggttagggatttggacagggcactggggagtggcatctctgtgctctatcatatctagagtttcagcgaggagggctcattggctggggactggaataatcttctggcagtgttttcactcacaagtctagcatcagtgctcactttggactggacctatctggggctcttcacatggcctggggttcccacacagcgtggcagcttcagggtagtgagaatcgaaaatcaggtgtcccagcaaaagttagaagctgtaacacctttccacacccagccttggcttcatttccactccagccttttggttacaagagagtcacaagaccacccgcattcaagggaaagggacatagacttagactttgtttctcaatggatagggaatcacagaatttttagacatgtttaaagtaaccacttgtggtataagccttctcttgtctccttttggtcctgagaaaccattaacaaatatttttttctttatctttgtatagcacatacagttttttaggtactataacctaagactgttagatataaggtcatatactttaaaagtacaacgtaactctttttcccatccctgattcttttctgagtattctggagacagggagagtgggggcaaatgtgtacccagaaatacagtgacaggatggacctcatacctcatagccagtgctactcagccagccagtgagacatgcctcagtggctctcaaataccaatcttctcagctagcagatggaagagatcactctgcctgctcccttagtgataagggcagggaacccaaacagactgtttatctccagttaatgtctctgcctcagttgtacttgaaaagcaggatcgtgtattctgttccctcaggtgactcatgatagtgcagcaaagtgttttagtttttgtttgtttgtttgtttgcagggaatataaatgtatttaaaatctttaacagacagtttttgttttttaactacaaatttgaaagaaattgaaaaatattcaagtaggtagtaagggggtaaaagaaaaaataaagatgttccttaaaatattcaaaatattttatatttataatttatctccaaatttcattttggagaatggcagagctggacatggtagctcacacctatgatcccagcactttgggaagcctagttcaggtggaaggatagcttgaggccaggggttcgagatcagcccatctctaccaaaaagaaaaaaattgaaaatttagccaggtgtggtggtgcatgcctataatcttagctactcaggaggctgagaaggagaatcccttgagtccagcagtttgaggctacagtgagctatggtctgtttgtaccactgctctctagcctgaacaacagagtgagacaccttgtctctcacacacacacacaaaaagtagaatatttggaaacagtatttctcccttgtggggggaaaaagaaaaagtctttgtcctggagattataatcacatcttggagatgttttcaggggttgatcattctctgctatgtagccacatagtgctttttatatactctccaagctcccttctcttgcccctttttttctgtgtttggggcctttcatagtctggcaaaaagttggaggttattgccattcttcagaatttagcaggaccctgtaggaacaagaacaatatctagactcccattattaattaggacttgaaaccaaaaatgcatgacccttctaaaaagtgagtgaggatgaggatgaagcaaaggggaggcaggtgctcatagagtatgtagtattctaagcgttactaggctgggacttccccccaaaggtgatgacttcctttagtatgtgaatcttgaaatgaaagaggcacttacccaggttcagataaatgaggtgtccagcttagggcaggtgaactctgtggtaagagttatgatgacatcaggggacaggtttgcgcaaggcacactggacggaacatagagtaagatgatccagtggtgtctagaatgtggataatacccaatgtatttttgtttgatgattggaaaggagaaagaggcaaagccctttctcccttcccaggcttgggaagggctgatctgatgcatgctgtgaatatgagtcgacttactggcgagccaagtcctttcctggagagcagttttgaccagaagtggtagacaaaacaccctcgtccctggttggaaaacattaccccagggtgatgaattggtgctctcaggctaggtctgggtgtggaatgaagatagataagcaacaactgtgaattaggttgagtgcgaagaggaacactcagcttgggaaaggaaacaacccacgtttgcaatgcgtcatcctgcgccagattgagcacctcaaggtttgtctgcacacagttggtttgtactccaagatttcttcacattgtagtaaagaaagattaaccttgcccttgaatgaacttggtctgagctgcagaaacaagcatttgggcatgcccaaggttgcaaaatggaaacaagccagtgcaccctgaaaatctgccctttttttggctcacagacactggcagtagaaagttaggccagaactggctggggttatattggttcatgtccagtgaggtcagtagcccagtggctaggtctgttccagaatgatcaatggtgttcactctgaccagtttctctaattcaggtgaagtatcttttccataccccgctgagaacagggactccagtgtcaccttagaggttctgatcctgactgctcatgtgctgcgaacctgacccaccaacgcgcagagaagcggagtgcagctaggagtctcttccctcagccctgcggaccagctgactcccaggccctggcagcccctttgaaagctcttactctcctctgtgtgacacaccacaagtggcctagcagccgtagctggccaggattaggcctaagtcatggctgtccctgctgcctgtgtgtgaccagatcattgatgacaacaggtctgaaaagtgtcaggatgttacccatttctactgcagccatattttagtagggaactttgaacaaggctgaatttaaattattaacaactaagtttccgaagtcaagtcagcgtatctcagtaatcctgtgtagtctaaattagattttttaaaggcgggaacgtgccatagattataatctctcaaaatctctgggagccacacagcatataaaatatgaaagttgtcatttaccatctctaaaacttcactgacaggaatgatttggatatatttaacttctgataaacaatgataaacattcactttatcactcctgtcagttcgtatgaatctttcagtcctctaaagcattagctcttttcttttttaactccatttctgtcaacaagaacaggaaaatgttttgtttataaatgctatttgcaacctgggacccatcttgttttatgaacagattctccaaatcttctatgcctttgaacacggacttactctactctaatgcttaagctccagagccgtcggagagcctggcgcagtagacagaccagcacgctggcatcggatcactggagccagtggccttctccagttcacttgttaacttctcagctgcagatcactttttgtactgcagtgacttttgtgaacattaatttttttctttccagatatgcattttattttattttatattagagacagagtctcgttctgtcacccaggctggagtgcagtggcgtgatctcgactcactgcaacctctgcctcccgggttcaagcaattctcctgcctcagcctcccaagtagctgggattacaggcgtctaccaccacgcctgggtaatgtctttgtatttttagtagagacggtgtttcaccatgttggccaggctggtttcgaactcctgacctcaagtgatccacctccctcagcctcccaaagtgttgggattacaggcgtgagccatcacaccccgcccagatatgccttttgtattaaacttcatgttatacatgaatatgttcttttattcaaaacttctctcatgtctgaaatattttaacctactttcccttgtttttgttttattctcaatgacttctaaaaattcatcaataagccttaattcttttaactgtcaaatatttgtattcttacctctacagactctacagacaatgcttccaaaactgaattccagggttttaacaactctggatctttctaggtgtccctaagtttatgcacatagtagtacatcctggaagttgttatgatagaaaattcggcatgctttgtctatatgggttgtagtttatatagcagttgttcctgattttaacaattggtcctgactccaagatttatgttttgtttgtttgtttttgagatggagtcttgttctgtcgcccaggctggagtgcactggcgccatttttacttctttcacaagtagaatttttttaaatgttagcaatataggaagatgtcttgaaggtcacacagttccccttctcctaattctttagtgagcgtgagtgctctggctctcttaaaagtcatttctccccttcgaaccctccccagtctttttctcgtttgagccacaaacagtctggtttctactgtattaaagcaaattaacctagtaagaaacactgactttttttttactggctacagttctaagcacaagaaaaggggaaaggagaccaaataaagaaataggaaaaatgaggcattaaaggggagccaacacggggtttggaagggatgagagcttccgccatggcaggatgggcctttcttgcactgcttactctgagttcagaaatagaggaggaaagaaggtagatcatgccacagcctgaaatggatacgacacataccagggctcccatagagtgtgatcggatgctgggtgtaattattcaagtgtatgcatttgaataaatcatcttcctcaacctcaacactcaaggttgaagtaagcatagtgtgtgacatgccagccacatagtgagttcactcaaggagcaactgagaaatgtcaggctttacttgctgcacacccccaactcggccaccaagttgcatctgaatgcaccttgaacccttgataaaatgaactttcaatcttaaagactgttagaactctcactcccttccattgggaaaggtgcttcctggctctaggaggtgggtggggaaggggttcctttgaggaggatgaatgtggtgtgatttttttggggggcggggcggggcaggaggacggaatctcactctgtcgcccacactggagtgcagtggcgcgatctcggctcactgcgagctccgtctcccaggttcacgccattctccctcctcagccccctgagtagctgggactaccagcacccgccaccaagcctggctaattttgtttttgtatttttagtacagatgtggtttcactgtgttagccaggatggtctggatctcctgacctcgtgatctgcccgcctcaacctcccaaagtgctgggattacaggcgtgagccaccgcgcccggccagtgtggttgtttttaatgtgctcaccgtagcaacagtcaggctagtggtgtgttcattttatttttaattaaaaccacctggaatgtgttttagtggtatttggagacctgctgaaaggaaggagatgcttaaatttgtttacgtaaaaaatgtgcttgctttgttttttgtgaaataaattgagaacttcagacacattgctcaaggccctgggcctgtccagttagaatgctaagatccactcaatgttagcttatggttttcttttgcatgaacatggataagatagtaagataatgtggatatgggtaggaaatattctaacaaactactgataagagtattacatgcctgtgagtgtggcatagggcggttagactttttccttacttgttgaacctaatacgagaccccactagagtgttttatttttactttaacgaatttgaagtatcacataaggctaggaaggcattcaaaatacatttctagcctgacaagaaacttagagtgactgtaatatacatagattaattcaaccaatgttccaagtgcttatcattcacttccaccctgcaagcattgattgagctcccagtttgtccaaagcactgttatgagcaaagcagacgtggacaaaatgattcaaaggtttgtgaccagtagcagcaatcagtgaagaaacaccatcactagaatgtacttgtgaaggtattggaggccactgcatggcaagaaagatacagctggagagggccttgtatggcacactcagctgcagagacgggtctgtaggtgctcaggagttactgggaaaggctgtgtattttcagagccagtgacccctctgtggatgcagtagactcttggttgatcaggctgggcagtttgggccaatctaagtaaggaggaggatcttagaaattgtgatcgttaactggagcatcgtcttgtgcctgaaaggacctttttttattttattaaccaaaaaaaccacaggtacagtaaattacctgtctcaattacagaattttctgtagtgcctttatgttagagatgagatttcattgtagaatgctttatttgcaacatggacacttccctgtaagtttctattgtttttgttcattcaaactaggaaattaagcagttattcaagatgttcaagatgctccttcatttatttagggttatctgttgtttttttttttttaagtatatgcattgtttcattgtttacttttagggaaaaagaaatagtggtttcagacagtgcttcttcgggagccagaagcactgcaagttgacaaagctttgtccggcaatggggtacacattcaggctggccgctcgaaacgacattggtaccaggtatgacgtttccttgtcctcttgcccttcagcctttggatggtgatcctgagccttcttttacatagctggaaggcatgaggaagcctgctgcctccacactaaatcaactggaggttttccaagagggaatcctaatcagaggagagaaggcctcctttaagctggtgaatgtcactatggcctctgcagtcttgcaagctgtattgcgaaggccccactaggggtctctaagaaccaaggtgaaggtagcagtacagatcttgaaaggaattcctcttggagctttaattttttagatcacatgcctttttcttttatcactttagcaagctcttcattcacttgccttttttcaattatgtgagtgtttcctggtacaaagaaagagatgctgggccagccattgttgtcaagcccagggcagatacggaattggagaaaacctggactgtcttagaggcctctgcaggcctctaggctgtatgagaaaggcgagaacgggtgtactgtaaggtatcaattgattaaagaggctttgaaaaggccatgtttcagttgcacttggggggtaactcttcattaagggaaaaatctttttctttcatcactgcttgttgaaatcttcttaaaggttttgcacatcggtggtccccaaccctctttccaacctaaagaacctctttttaacatcacaaagttttacagacctgcctccaccaccatggtagccattacagcttcagagttcactggttgaaaaaataccgacacaaagccctttatggctcaagaatttttaaatgaattggaagcatccacaaacttttgaaaaacagcactgtatatattgtaaaacattatttcatcaacaaatatttgttgctcacattgatttgaaggctccttgacccgtaacttgataaacattgccttgtgctataccttctttccagtgcttttgaggggggaaaatgaattcttaagtacaattgtcctttggtttccacaggggattggtttcaggacttcccccacctccctgccatgaataccaaaatctatggatgccccagtcactgatataaaatggcatagtctttgcatataacctacacacatccttctctccttaaatcttctctaacttgcttataatatccaatataatgcccacacgtcacttcattcacgtggactcaagatgcagaacccaaggatacagaaggccaactgtatattgtcctgtgacttggtgtgtgtgtctagtagaagatcatggggtggggggatggggaagctgaaggtggttatagggaatatcacacacagcatccttacctggctttgcttactctacctgctaggctgagttgggtagtgtgcaggctgagccttcctcttttaaaatgccaagcctcttcacatgcttctaactgtgtgcctcactttctttctctacagtggttatagccaagaggtggtgtgctacacattaggaaatatccctcagatgccttctgcaccaaggctggttcgagctggcatcacatgggtcacgttgcagtggagtaagccagaaggctgttcacccgaggaagtgatcacctacaccttggaaattcaggaggatgaaaatgtgagttttacagattttatacttctctgtgttttgtacgagtcagtattattatagctacagggcaccatgaaattagattaactgcatcagttcaaagccaaactcttaatttctgcctctgtcaccaccactaccaacaccggcctgttctttcccatctctgtaaatgacatttccatcctttcagctggggaagcaaaaactcttggagtcatccttgatcctatatataatcagaaaatccttttgaatcttccttagaaattatttagaaattaaccatttttatctccacagctactatccttttatgagccactcatctcacctgtggattattgcaataacataatattgttattggattatagcctcttaatattcctaacttcatccttactaggcttcagtctgttctccatacagagcctgggtggagaacatcatcttgtaaaatacaaatagatcatgtcagcaccctgctcagaatccttcctgtctcagtgccttcccctctttttcagagtaaaatccctagagctcttacaatgcccacaaggtcctgtgtgattgggctctccattactgtcctcgttgcttccactcactgtagtcttattagcctctagtctgttctttttgttttgttttgtttttgagatggagtcttgctctgtcacccaggctggagtgcagtggcgcgatgttggctcacctcaagctccgcctcccaagttcatgccattcttctgcctcagtttcccaagtagctgggactacaggcgcccgccaccacacccggctaatttttttttgtatttttagtagagatggggtttcaccatgttagccaggatggtctccatctcctaacctcatgatctgccctcctcagcctcccaaagtgctgggattacaggtgtgagccaccgcacccagccagcctctagtcagttctttaaacacaccgtgtgtgctgtggcctcaaagccttttcagttctgccttctggccagaatgcccttccagatgtctttgactcccttccctcattttcttcaagtctgttctcatatgtcatttctttgggcagtccttccctgatcacactgtagaacagcaccacccaatagaactttctgcagtgatggaaatattttataatttgtgccatccagtatggtggcacctatacacatacaactctcgagcacctgacatatgcatgttggcctatagtatggagggtttgtgcttgtttgtttgttttgagatgtagtttcgccttgttgtccaggctggagtgcggtggtgcaatcttggccctctgcaacctctgcctcccaggttcaagtgattctcctgcctcagcctcccgagtagctgggattataggcacgcagctccacgcctggctaattttgtatttttagtagagacggggtttctccatgttggtcaggctggtctcgaactcccaacctcaggtgatctgcccacctcagcctcccaaagtgctgggattacagttgtgagccaccaagctcagccagtactgagtttttaattgtaataaacttaaattcaaagagccacatatggctaccatatttacctccagcagctgtagaaagccctcaccagttccaccactgtatcctcctacctagctttagtttttgtcatagcacttaacaccatgtgacatacatagcagcttttctgtattgtcttctcccactggaatgtgagcttcttgtgggcaaggccttttctgttcttgggcagtgctgaatccttagagcctagaggacagcccaacacagagaaggtactaagtagtattttgatgagtgaatgatagaatgatagagatagaactattgaatgagttccctgagttcaacttttagtggaatgtttgccctcctaaaggattgtgccctttcccatctaagctgtcctttctcccatggccagaagagggcactgtgtggtcaggaagctcagccacactttactgcatagcacattgcagtttgatagtaaagacctcggtgcaaagggcttttttcatgacaacattaaaaatgttaaatgtattttcaaaagttgcttaactcctttgtcacaataaatttgaccagacccaggagaaattacagtgtgatggagataaatttttatttaaagctcaagtgctatccacaatactctgggcttctgatttttctcttttgcggtagctgccagacctctggccagttgctggtgatggtagggaaaggcagtataaaaatcctgtattcaaaggtatttaatgcccagaattttttatactgatgtttcttcctggctttgccttttcaggataaccttttccacccaaaatacactggagaggatttaacctgtactgtgaaaaatctcaaaagaagcacacagtataaattcagggtgagtcagtcattttgctacctgaactgcttaaaaatgaaactgttttctatttcaccatttaccatgtcagattgactctacaggttaaaaaatgaagttcacagcactttacattttgaaagtaacatttataaagtgtacaacatgctttatttatttatttgagatggagtctctatgtcactcaggctggagtgcagtggcacgatctcggctcactgcaacctctgcctcccgggtttaagcagttctcctgcctcagcctcccgagtagctgggactataggcgtgtgccactatgcccggctaattttttttttttttttttttttttttttgtatttttagttgagacgggggtttcaccatgttggccaggctggtctcaatctcctgacctcgtgatccacctgcctcggcctcccaaagtgctgtgattacaggcatgagccactgcgcctggcccatgctttaattttaaaaccaacttgtgagcacaaaaattgtcatcatgtgctgtaataaattgcatttacagcatggccaaatgcccttgcctgggaagagacacaccaggtgctggagtgcacctgtcacttacctgcactccatacctttttcctttcgagcagtctctttgctcttcactttcctttgctcttctgcccatttatttttcctcacttgcttgtaattttctcttccatgacccaccccctccctacctgggctgtctttggtcattaacagccaccattaatgttactataggactatgtgtagtagccaaaaaagtgaatatgactttacgatcactaagagatcaaaacgatattctgcagcactgtattttctagtatgacaagtgtgcgttttggaagataagattgtcttctgattccacacattcttctctaagtcagggaccaaatgctattatttggcacatagcaatcactcaataaatagttgccaaattatcaagtgcagtgtgtgactatttgagggaaatgataatttttaacatattttttaaaacccttattatcgatgctggctatgagaacatagctatactgctaacgtttctccacaaggtggcattgccctacgctttaaaaagtggggctatttttatgtccccccccccacccccatattttcctttcacaaaacaatacaaaccaggtgatgacatacttgttttatcatgtctttttgaaagggtaaaaatatctttaaaacccatcttatcattttatttttatttatttattttttgagttggagtttcgctcttgttgcccaggctggagtgcaatggcatgatcttggctcaccgcaacctctgcctcccaggttcaagggattctcctgcctcagcctcccgagtagctgggattacaggcatgtgccatcacgcccagctaattttgtacttttagtagagatggggtttctccatgttggtcaggctggtctcgaactcttgacctcaggtgatccacccactttggcctcccaaagtgttaggattacaggcgtgagccactgtgctggctggttttatttttaattgttaataaccaactatacagtaaatgatttataaaataaatactgttaatacttgagttgaaagagaaaaaaatgtgtgtgtgtctgagtttatgggtgccttaatctcaccatgttaaaaagtgaccattaatttaatgatccctgataactaaatcatgttaacgtttccttggttgtgttctagctgactgcttctaatacggaaggaaaaagctgtccaagcgaagttcttgtttgtacgacgagtcctgacaggcctggacctcctaccagaccgcttgtcaaaggcccagttacatctcatggctttagtgtcaaatggggtatgttttgctgctgctgctactgttttttttttttttttcttttgatagatttttaaaaaatgattcattttagtagtgacaagccaaaaaaattgtggatggtatttgcagaagttttctgcattcggaatatatgtgtgagaaacatcctgagaattctacaaattggaatggacaatttcattaaaatgtaatcgtaatggacaattaaattttagtggaaattaaaatggatgatttttaagagtatctcatttactctatgattttcctgtttacatatttttttctcctatatttttaaggcatggatttgaatgtagtaatctctgcatgcatcgttcattcttcaatagttcatccttaaaaaattagcaatacttaatagaaaaattttgatttataaagttaatattgaaaataaatttcaaaatttaggtttgttaagtaaactttagcatacagaacatttaagttgcaatgaattagggatagttttgtttccattggtgtttgttgtataaagtcttgaactttgggaaattttaacattaaagttcataaggagtttgaggttgtctggcaaaaggatattgtgcctcacctctgttgtgtgaattatttcaataaaatgaatacaattagaaggttgacaattaatatgtaaaagtgttatgcgtatcatttttactaatgtcataataatattaactaataggcaaaaaaaaagttgaaatcttaaataaaattttaccttgcagccaagtaatataaggggaatttaaaacattattacaccaaccactgagacatataactgtttcaagttacctaataattgtgagatagaattattaggatttctgtttccccaagagatggatataattcagagaaatgataaaaatctagatgtgcttttagccagaccatagagcttttctctcaaagaacctcagaaagttctgtcaacactacttactttcattggctatatgctataatatttaactttataattattattgtaaatatctactactgaagtatatatacattaatggaaataccaggtgaaggagaggggaagtgaatgttctaaatttatatataagtaaaacttaagattttttagaaaaatctccgctatgtctaagaatatagaagtggcagactgataataagggtacattctttatagttttgcaaaattagactgcaaaggaagtgtttttctgctcagaaaataaaattcctttaggcacagagttatgggtagactatatacccaaggtgcctagggctctagtcataagccagaaccttcttcctcagactgtctgctggtgcactggttctcattgatccacacctctggtttcataccacattcacctgggatgctgggatgtaaagtttgcttggtaggaaactgctagaatggacgtattccattttgatattttatttattttgtcaataaattttgtacttctctttccgttcctttccatcactcaaaagaatcttgttggccgggcacggtggctcatgcctgtaatcccagcactttgggaggctgaggcaagtggatcacctgaggtctggagttcaagaccagcctgactaacgtggtgaaaccctgtctctactaaaaatacaaaaaaattagccaggcgtagtggcgggcgcctgtaatcccagctacttgggaggctgaggaaggagactcgcttgaacccaggaggcagaggttgccgtgagccgagatggcgccattgcattccagcctaggcaacagagcgaaactccatctcagacggaaaaaaaaaaaaaacaaaagaatctagtcactgataaaataagtgaaataaaaagaataaaatcagaaatatgaacatacagtcttacataaaaatcatcaaatatattaaagagcaccttcaagtaaattcaacaacttgatcagtttgtgccgagttttttgttcatatttcactacatgaatgctctttgacatttctatatctaagaactttgaatagtctgatagtattcagagattcctggtttgtttttttcttttttttcaacagaggagttggtgaaataaattattttgccttttggtcatgtctagaattcagatagtataatggtgtgtgattttatgagtcctgatgatgtttaccaataaaaatcaatatccttttattgctaataagacatttggttattttccagatccccctaaggacaatggtggttcagaaatcctcaagtacttgctagagattactgatggaaattctgaaggtgaagtttttggcaattgttttattcaaatccaatagcaagctctgttttctaatatagtaaatgtctttatagtaatagtgagtaatcattaattctaaagatagaattattattacaataaacaaactttagtcacatattggcagtttttctatttcaaacacagcaccagagatcagagtctacttgaaacttacatttgtgttatttaacaatttttctgtatctttttcattggtgttttgttttgtttatcttttgtttttgtttctttggtttggtttgtttttgttttgttttttgagatacgatctctgtcacacaggctggagggcagtggcacaaacatggcccattgcagtctcaaactcctgggcttaagtgactcttctgccacagaagatgaggaagaatacatttttcatagtgatggggtctcactatgttatctaggctggtctcaaactcctggcctcaagcaaccctccaccttggcctcccaaagtgctgggactatagacatgaatcaccacactcagcttccatgtctttttatgaactagggttcctaattaatcagataaatttggtattttcatctcctaacttgccatatgttttctggaaattcttataagcagccgagagtggtggctcacgctgtaatcccagcactttgggaggctgaggtgggtggtcaagagatcaagaccatcctggccaacatggtgaaaccccgtctctactaaaaatacaaaaattagctgggtgtggtggcaggcacctgtagtcccagctacttgggaggctgaggcagaagaattgcttgaacccagcaggcggaggttgcagtgagctgagattgcaccactgcactccagcctggtgacagagtgagactctgtctcaaaaaaaaaaaaaaaaaaaaattcttataagcaaagagagtatcagaggcaggaaggggaaggtggagatagtgaaaaggggtaggttcagtaatctacaaattcccatgcatgattaaacagtatatagtattgtgggctagtgacaagaatcacacttttataacaagtttagaaaatgtctttccaacttcattgtcattttgcttcaggtttttgttactattcatactgggtggattaacatgggacaaatgttagaaataaaattccttagtgcctttttaaaaattctaaggttttctttctaataaaattcattagactttaatagagaaaagtatagtcttcaaaactttttaaatgacatatcatctcaccactgtaataatctctctaactattaaggttttgttttgttttgttttgttttgttttttgagacggagtctcgctctgtcgcccaggcgacagagtgcagtggcgtgatctcggctcactgcaagctccgcctcctgggttcatgccattctcccgcctcagcctccggagtagctgggactacagacgcccaccactaggccggctaattttttttgaatttttagtagagacggggtttcaccgttttacccaggatagtctcgatctcctgacctcgtgatccacccacctcggtcttccaaagtgctgggattacaggtgtgagccaccgcgcccggcccaccattaaatttttttttaaatggcacatgctaatgccaaaaacagagagcattgataaaacttttacaagcaagcagtgctgatgtgtggctggctttttattctgtaccatgagaaccacctggaatttttttaagtctgttggttcctattttaagctgaaaacatgagaattcttttgagatgagcacagctgttctaaacataaaatcatattttgtggttaaaaacctggtttagaactgctgggcatggtggctcacacctgtaatcccagcactttaggaggcgagatgggtggatcacgaggtcaggagttcgagaccagcctggccaacatggtgaaacccgtctctgctagaaaaaatacaaaaattagctgggtgtggtggcatgtgcctgtaattccagctacttgagaggcagaggcaggagagtcgttggaacccaggagtcggaggtcgcagtgagccgagatcgcaccactgcacttaagcctgggcgacagagtaagactctgtctcggaagaaaaaacaaaaaacaaacaaacaaacaaaaaacctggtttagcttttcttcattagaaaaacccaactaggttagaagtcatgtatatgccagtggctcgttgtgaatatttaagtatgttttgaattctcatggctccctttagctactgatgacaaatcaaaagtaggggcccttctggacttccagttaacaactttgtgactgcatggctgagtgagtgattgaatcttttcagtaatccttgctcccagtcaccttttcagtacaggtttttttgacctgtaatatcaggataattgcctttgctattgcctttcttcatatggccttagtgcatgcgactctgttgtgaatctaaactaataagccgctgggggaatttgtggaagttactctagttaaaataccagggaatagaaaaagcatttcccctaaaacaacttcatgtagtaaaaggcttttgtaaagtggtcaactggaaacacagcgtgagtgggaataaaacagaggagtgaagagcctcccagtggcctggaattgtgagtcaggcaggcggctgaggcagccctgggtgcccttgcttctgacggcatcagccttggggggcacccagactcctggtgaccgtttctctcttcagttccacaaagcggtcagatcacttgggtcatgccacatttggtctttaatttgtcacccccgtaggcatttttgtctttttttttttttttttttgagagagtttcactctgtcgcccaggctggtgtgcaacggcgcaatctcggctcactgcaacctctgcctcctgggttcaagtgattctcttgcctcagcctcccaagtagctgtgattacaggtgcccaccaccatgcccagctaatttttgtatttttagtagagacaaggtttcgccaggttggccagactggtctcaaactcctgacctcaggtgatccacccacctcggcctcctaaagtgctgggattacaggcgtgagccaccgcctgtaatttttgtcttttaagtggagctccatgaaggcagtcaaaagacccagtttttaaaagaggatttcacttcctttgacctctaggcagataagaacagggagaaattcttgcgtaccaccccagacttgccagaagcctcgtggccaagaagtagccccgtgcctggctgcccctgaggcctcctcacaccaggagcatttgatagcttgcccacccctgttctgtgtctcctaccactccctccatgccagcggcacgtttcattatggtttcccacatccaaacctcatagcaaatgtaattgtggtgataataggtagtctagccagcaacactaagtattaaaaatgactcaatgttattttggtatttaactttgtaaaagaaaaaggaagagctttctggctatttaaaaagaaaaagaagatgttggttttcatgaaaacatagagctttttcttgtcagcaatggctgatatgctacatttttacaagaggcataaagtcatgcataagtcttgttttacagcgaatcagtgggaagtggcctacagtgggtcggctaccgaatacaccttcacccacttgaaaccaggcactttgtacaaactccgagcatgctgcatcagtaccggcggacacagccaggttggttttgtttccatatgaaagtaaacctcattgatcaaattcggacaaactgtctataacatcagaagcaaattgcagtttaaacaatgtatcttggtaatgcaacctaatagtatcatgtcaggaaatgaaaaatagagctttctgaattgctgtttagaggtataagataggcctaaatgattccctactgaattgtggtattttcgggtacatttgtcactcactcatttctcagaaggctttgacataatcacctgtgacagttgaaaattgtctggaatttgcattgactaaataaaggagacctcggttattgcaatgattaaaaaactatagattttagagtaaaaagataagacctgcacagcactgctgttaccacatctatcaattttaagaatttgagacataccttcctcaaggtactttactgccatctgctggaaagttgttgcaaaaacaatataaatccatgatgactgagctgagtggcacctcctgaagttgtgtggtacccaacgtacacatctgtaggcagcatccattcttttgtttctactatttatatgactttagactaacctgttaacatgtcaggagccttagtttcaaccacatagtactctcataggcgcaaaacaacctaataaatatacatggagtactctagaaataattgttatctaaatggttttaacttacactcagaaaagtgaatgagaaacgagatgccaaaagatactttcactgtagagatatttaacattatgatttgaaaccactaaacatttaaaatgaaagagaaggagagatggtggcttacagccctgtgctgggttgacttttcaagagaatacctgccatttgaaggcctaacttttctagtcaacccacttgcaacatcagtttttgtgtttactttcttttgcccccaaggatggtactagggcatctagactgcccatgtagacactgcctgtgaggagaaggtccagctggaccatctttatacagtgccgaagctgtctggaatgcctcccaggtggagtaaatccaaatcaaagctgagattatcagtggtccttcctatgtgtgaggcactacacaaggtggcactgaggctgaactgctcaaatgcatagagttcatttcctctgtgccacttctcaggaagaaaactgaatgtggctgagctgtatagctctacctgattttctcccgtctcaggaagtaggtcagcttccataccactagccttacgcaaccagatcctgcaaaataaaggactgcttattttagcattaacagtacctgctggttgatgtcagaatcaattgattaatattgagtttatttgcttttctgctctgtatgtgagtggttggccatttatggtaccattttaaaatttcatccagctgtcgttttgtgttctcttctgtcctcatgaagggtctttctaattttgatttgaaggaaaagaattgtgtgcttaggatatacagtactcatgtctgctaatctaacttcaaaaataatcattcttgtttttcccagtgccatatgaagtctatagccacccttaaaacacacacacataaatttatatgaagatcttaattacattaaaagcataccataatgtgcacacatttagtgtgtaaccccttttcggtaacatttgcagttatggggtggaatttgcctgatatgtagaggtctgataaattcacagtaactaagagatggttctctctggtgtttctcctgcagtgttctgaaagtctccctgttcgcacactaagcattgcaccaggtcaatgtcgaccaccgagggttttgggtagaccaaagcacaaagaagtccacttagagtggggtgagtgaactaaccttcacattgacattgacaatttggacaattggagatgaagacttatgctttgtagttaagtttcaaagctttcttctaaagaccatatacgtttttgtctgttgaggatgtccatattcttcttgaagtatgttgacccaggttttttatgtgtgtcattccccccatccacacccgcaacactgtccctcaccttcctcttcctgatggtgccacacacatggtttatcccccgcacttcaggggacacatttctagggagtatttcaagaacagccagtctttttcagaaagttttcaactttattcatgggaaaaaaattttgtgctccatttagaatttaaaccaaagaatggtttataagatcacatggaattctttctcgtctttgtttgcaaccacctctgctgcattgtcctgtgtgggtcctgatgtttttacagcattgatttaagctgtattagcgtttcctgttgtgtccagcagtttacaacatgtataattacaagtacaaatgtacagaactctctagcagactattttttcctaccacttatgtctaaagtataataaattgtgccaatttggggtcctgtattttgatttagcatgacctttggtttccaattaaagagatttttcttccctctttttcttccatttacctagcattagaatatgaagaaatatatctaatgttcctataattttgggattattttatcaatgtaattaaataaacttcagtggacccgctttggagagtatggataacatcattcagaaacttttatttttatatctcttttttggtgggcatggattcttttgtaagggagatactgaggccggccacctatgtgatattttgctcaacttgtgtgaaatctggtgcactttggtcaactggaagcacaaagtgttctaagatgaaaaaaattcttcattcccagatgttcctgcatcggaaagtggctgtgaggtctcagagtacagcgtggagatgacggagcccgaagacgtagcctcggaagtgtaccatggcccagagctggagtgcaccgtcggcaacctgcttcctggaaccgtgtatcgcttccgggtgagggctctgaatgatggaggggtgagtataagcccatacaccataaccagaatcagaatgcataatcagaacccaaagtgctagcacttctgtctctagcctcctgaaatttttgacagtcttgatgcaaccttgacaaccattaatgcagtgtctgtaaatcttaattctgagttgatattgttgtgatttcatatagacccagcattagaagttttctgtttcttttgtcctcatatcattctatgaagacagcactcaaggttaataaggatatcaccctgtagatattttcgacagtttttggaaaatttcctattctattgactttatcagttcagggaaattaggattagataatagttctaataaaagttttatactgtcttgtctaaatgaaccagcaacatcttaggtcagtttttacaactagagaagggtagtggccagggacaccagcttgtttttgttttgtttcacgtgaaaactacaggactctctccttctattgctccatttggagttgtcaagttgagctatcaaaaattgagaatatatatgtctatgttatatccataaaggttgttgtcctttttttctttgaaattgccaaatgatgtggatttagggggagatgaataatgagcagtgggagtcccagtaactgtgaggcttttgggtgggctcagagattgatgaagcataaaagggcagaagcgtgtgggtaaagccagctaaatgccccgtccaaagtgccagtggtttgtgtagatgggctccatgcaaataaatagaattaattaattgatgattttttaaaaaaataagacagcccaacttgcagtgactttttgttttaagtgaaagcaagtttattaagaaagtaaaggaataaaagaagggctattccttaggcagagtgcccaaaactggatttctcctaattctccaatagaaaagaatttcagacacaacaatgatacttaagtgaaaacaaaaaagtctgaacattaacgcctatgtacctgaacttataatcatgtaagcgaaaagaagatggatagtgatgagcacactgttgtgtctaccccattctctcatcaacttttcagttactatctgccacaacaaagataaatgtgcaactgggctggtgtgagctgtacttttctcagccctttcactgatttatcctataaagaaactatcttcagcttgggtttattcctgttgtattagaaattaaccatatatatcgctgtagtcaccttctgaggtccatttcagagagcttccccaactccccagcatctttgcatgttatgttgagaggtggttttttgtttcccccctccccgccgtcttttttctctcattttgacaaggacagtcatatattttgttagcctggcaagtttttactctgctccaaacctttgaagtatcaaatatgccaccattaaaatgggtggttcaggtggctgtgactctctcaaagtgtggtaagtctctagcaattcctggctctgagcagtgtggtcactgatggtaacatcaggattgccgtggatacccttgaataggtgaggtgatgggaacacactgagaaaacattacagaagcatttattttcaaaatggaaaataccggtaactagaagaaatacctagaatttgatcaccaacaattccaagtatatttttattcattaaaaattaaactgcagtgggcatctgacttagttttcttggatgtcctctgagaaatatgaaagcagattgccctgttttgtcaaaaatcagcatatttttatttcatgtcccaagaaagggaaaatattttgtcaaccaactaattattttacaattaaaaaaatgacagacatctactactcagggactgtatataggagaaaaacttacacacattgaattgaaagtgaaaatcattgggtaatatttgttaattagttgtgttgatgatgatgttagcctagcttttatttggttataagcttttgtatgcacacacattcacaaacacatacacgcatatatacatacgtgtgtgtgcgtgtgttttctttcagtatggtccctattctgatgtctcagaaattaccactgctgcagggcctcctggacaatgcaaagcaccttgtatttcttgtacacctgatggatgtgtcttagtgggttgggaggtaagtcaggcatattctgcatcaacttctgtttcttctactttactcccaaatacaaataccaattataaggaagctgcaaatccaaaatgcacatatagatgattttttttttttttttgctctgtgtactatagtaatcacccttggcacttgccacttgcttatattatttagggttgtggaagttttactgtagtcaaaactgagaggaaatggtttctcatgcctttctttttgtaaaaaattttattttattttacttattttatttttttgtgtgacagagtttcaatcttgtcacccaggctggagggcagtggcacaatctcggctcactgcaacctctgcctccctggttcaagtgattctcctgcctcagcctcctgagtagctgggattacaggtgcccaccaccatgcctggctagtttttgtacttttagtagagatagggtttcactgtgttggccaggctggtctcgaactccttatcttaggcaatccacccacctcagcctcccaaagtgctgggattacaggcatgagccgccgcacctggccctattttatttttaaatttctaaatctcaaaaaaaattttgtgggtacatagtaggtatatatatttgtgatcgtgcctttcttttatatgtatttgaaatattctggggcatgttgctctctttcccattttagttaattgaatacaagcacagtaggattctcttctcagtggcattattaactacttccatttctgcctttccagagtcctgatagttctggtgctgacatctcagagtacaggttggaatggggagaagatgaagaatccttagaactcatttatcatgggacagacacccgttttgaaataagagacctgttgcctgctgcacagtattgctgtagactacaggtaggttgacattattcagatgttactcacaaggactgctgtcccatgaaaggcactttgggaaacccactcaaaggcttgtggtggaggctgtcaggagggatgatatggaaaaaaagagtccatttaaataaaaatatatttggttgttttggtgttttgcagttaatttccacttctctaggaaattctgaaacttaagaacaaaataagattcttctccattctgcttctcaccacccttgtatcttgtctgttcatcagtttgctgaataaatgacccaagtccaagggaaagatgacacagctccttagggaaggagccttctgtctcattcccctgagatgtacatttcagtgggaaagactcttagaactggtaaaagacagaaaattattttacgagctgttaaatggagccaaaaataatctggactagtctgcattagattacaggaccccacctcccacctcccagtgacggttatcaaggctggttatctataagcttccacttgggagtccagatagaataacatcaagaaaaattggttcatagcctaacccctcagagtgacaataaccatgggtttacttttattttactctcttggctatattattattttttctgtgtaaagccttagtctcttgagaaaatagagttctttgtcctcctctttccatttgttcagtaacatttcttgagcattatagtactttgtaccaggatcaaaggaagatcaggaagagagatacaaagattaatcagatgtggttgttgaccttgaagagctctgtcttcatacacatttagatttgaatagataaagaagcaaagatgccaaagtcaagttcccacctgatttaagtcatggatcaaattcgttattataagtacacccaatgtctctggtctctttggagaaaatattcgcttcataacttaatttttcagatcaactgaagcatttctgttaaattcagaagtctgctgtatttgaaacatttctgattaaactcttttgttatacacctttcttgcttctcgaatgaagcacctgggacataattaaccttttgacaatgagtcagtgtcacagcaaattgtctgatatttataatagtgatgctgagtcactggggaaaggttaaattatgtgccacactcttgtttttctaccaaggcaggatataaataaagagctgtctgccaccccagtaaagagcttcactccattatggtttttgagttttggtgtttctttaaaatgttattatatctccttctctttcagagtctatgttgtcttagcattgacttcccaaagctgcattataaaagatacattaataagaatagtacctgcataatcttgcctcgttgtattaacaggagtagaaatatattttcaaaggtctgtgcttatttataataaaatgagtcagatcttatgaagggagtactacttttaagattaccattgccacactaaaggactattgccaggaagggggtctgttcaaactataccaatttattgttatttgtggaccaaatatgaattattttcattcaacatgattacaaagtcaagttaaaccccaatattttttgaatatatggcacttaagaatttaaatattggccgggcatgggggctcacacttgtaatcccagcactgtaggaggctgaggccggctgatctcttgagccaggagatagagactagcctggacaacataacaaaacccctcctctacaaaaaaaaaaaatacaaaaattagccaggcatctgtagtcccagctgctcaggagcctgaggcaggaggatcacttgagccaggtcaaggctgtagtgacctgtgactgcaccactgtaggccagcgtgggcgacagagtgagagcctgtctcaaaaaaataaaaatttattataatacctgtactgtgttttatagaaatgtggtggaacatttcttgttttgctcaggaatttttgaatttttgtattttcaggactgttttaattaagtaccaacgtaattccattcatagggcatgttgtatattataggcatactattatttacaaaaagttgattttgaattaaatttcatttgaaaactgttaataaaaagtggtgtaaatcaagaaatgttttccatagagccaagctagttaaaaagaaagtaggatcctgcagtagaaaaagaacattggaagaattggtaagattctgattaggtctgtatgttaatagtatagtatcagtgataatgtttttcttttcttttttttcttttttttgagatggagtcacgctctgtcacccaggctggagtgcagtggcgcgatcttggctcactgcaacctccgcttcacaggttcaagcgattctcctgtctcagcctcccgagtagccgggattacaggcgcctgccaccacgcctgactaatttttgtatttttagtagagatggggtttcaccaggttggccaggctggtctcgaactcccgacctcagatgatccacccgcctcagcctcgcaaagtgctgggattccaggtgtgagccaccgtgcccggccaccagtgataatttcctggttttgatcattattctatagttctgtaacatgtttctcttcggaaaagcagagtaggagatagacagaaatttctctgtactatttttgcaacttttctgtaagtataaaagtagtacacaataaaaaggtgtttgaaaaaatagagaaaatactattttgttcataattttcccagtgggaaggaagaaagtgtagctcctactgttggcctgatactctgccagcattttacatattaaccgatttaatctttactgtaattctatgaattaggcattactgtccccattttacagctgaggaaacaagctcagagaaattaactaacctaagatcacacagttgttaaatgatggaatcaaggtttgaactaagcttcaactcttaaaagccatgttcttgtccttctgtgatatggtgatacaaagccctagttgatagaaacattgggctccatgatatcctatttttctgcccctgtgatacatttatatcagtaccaaaatctcgaaatacatacttataaaataatttgtcatgttaaaatttttccagaaagagagttgaggtattgaggtattgtaatgaaacagaagtgggtatgacaaaatgttgcagtagagtttcaactgtgatttaatagcaaataaatgctttaagcctgcttctttgaaattaacaaaggagttataagttttgttttagaccttgatttaagagctcaaacttagctgggtgtggtggtatgtgcctgtggttccagctactcaggaggctaaggtgggaggatcacttgagcctggcaagcagaggttgttgcagtgagctgagattgcgccactgcactccagacagagacagaccctgtctcaaaaacaaaaaacaaaacaaaactcaaactcctttagttttgtaattcaacctcataagctgtccaataagctaaatgaaaactaagttttagagtacattcacttttgtaagaaagctgccaaatgtttttctctttgtaagaaagaaaatctttttgataacatttattgaacacatactctgtatcaagtacagttgccagaaatacaacagtgagccagacaggcaactttgcccttatgtaacttgcattctaatcagaggagtactatatactatgtcagtgataagtgtcatgatgtaaagtacagcaaagaagggaaataggaaatgtggaagaccacagaggaaggattgcaaagttgaaatgtgttcagagagggctcgctgaacaggtggcacctacagaccttctctcaaatgaaggtgattgagtgagctgtgcagatgtctggagaaaaagctttctggacaggaggagcagccaagtgcaaaggccatgaggaggcagcaaacttggtgtccctgtggagcagcagggaagacagtgtagctggagcagagtcagtaaaggggagagtagcaggcaatgaagtcacagtgctaatgggtttttgaaggggaatggtggtgaacagcagatcatatagtcctgtagggttttgtaagaacttcaaagttttttctgaataagatggaaacccactgaaggaatttgaaccaaaaatctcgataatcctgattcatattttcactgaatcactctgattgctgtgaatttagactattgggcaagggccaacatagataccagctaggaggtcattagaataaccagatgggagagagagtagttggactagagtaatacaggatgtgctgatggcctggagaggggtatgagaggaagaaaggtgtccagagatgacttaattatgacttgagtgctctgaaggaggagggaaaccacaggagatgcagtcaggtttttgtaaggagggatgggatggggatgaggagctgtgtggacatttgagtttgagatgcctgttggacatgcaagtggagatactcagtggttgaatacagataccctagaccagtattcaaagcaggggactgggccacccatccaaattggggagtaggttatcagtggcgtttactccttgagacaagacgacatctccaaatgtttgagtagaggtagaaaagaggaggtaccgaagtactgagggctgatactcaccagcgttaagagttcaggggatggtggcaaccaggaaaggtgattgagaagcagcaggaggtaaggtaggaggagaaataagtgtggcatcttggagacctagtgatgaataagcatttgaaagacctgggagtgatcaaggtgtcagctgtttctcttgggtaaaatcagataagcgctgacgattgacttcagggatgagtttattattcatgtggaagatagaagatgccttttcctattgctattccaggacagctctagacttaaaagtcagatgaaccggattccggtcccagctttgcctctaaatctgaggcctaagttatcatctgactctgagttcctgtctctaaaaggcggataagaatacctaccatttaagatctaccacagggggttattatgaagatcgtgtaagatgatgtataaactgaaataggtcatgcaaatataaaatattatttttaaattatttgtcataagaaacgatggtggccatattttgctttaataatggaaaaaatgtggttagcattctttggaaggtggtcatcagatagtagacattttctaggatttatttctacctgcatatgtggaaatgtgtactactttagatttatttaatggcagctaactcagaggcatcaaaatgtgctaatggtgtaatatggcctttgtcttgctgttctgttttgtaggccttcaatcaagcaggggcagggccgtacagtgaacttgtcctttgccagacgccagcgtctgcccctgaccccgtctccactctctgtgtcctggaggaggagccccttgatgcctaccctgattcaccttctgcgtgccttgtactgaactgggaagagccgtgcaataacggatctgaaatccttgcttacaccattgatctaggagacactagcattaccgtgggcaacaccaccatgcatgttatgaaagatctccttccagaaaccacctaccggtgagtgcaagggagtagaaatctgcatcagcacatcagcacttggggatctaagtaaacctctcggggaaaatgaccaagtggatgtcatctcccagctgtttctaagagcccagatgtccagagtattgtctcaccttgatccctcaggccagaagacctgtgaaaaagccacactggttcagggactcactggacggttttgtgtccactctaacctgcaccgtctctaccccagagtggactcaaatcctcaagtcagtcctctgaacattgaagtcagaaattataaaagggctttggcaatatgttagcccaagaatttggcttcttccagaaattgtgccgaccttaacagtggcttaaatgatggtaaaacttttaagatttctaaaaggatggcattggagatacgttgacttttattaaacaacctatagttgtttaatgacttctaaaaaaatatctggagctcaggggttcaactgagggaacacatgttgagaatcattgtttactaattaaatgccaggtaaccgttgaaattatcaaaaacatcttccacgtaccagaaagcacctcagaggatagttctgttatggagaagatgaaatggtttagtagtgtaggaactatggaaaggtgagcttagatttggatagtaaaacctcaagaccctatttaaaaagtattttatgaatgcagcataaataatttaattcagtgttaatatgccaaggctagtatattgagctgaatgtgaaaagaaactcacattgggagaatgccaccttttccttataagatagctttgaagataccattttagacagatggaaattgaatagctttagaaaaggcaaatgtttgatcttggggaaaaaaaaaaaactttagatagtctttgctggccaatcaataaattataaactggacattacatacttgaggtaaaaataattcatacttgctttttcttttacatcttgaagtagaggctgatttttcaaaataatgaataggctaccaaatgaaggaaaatcaatcaaaaccttaaaaattcaaagtatgttcaatatcattctatagtagtttatttctggttaacatgtaggacagttttacatacccatttctgtttatatacaaatagaaaaaaatttcaaatatgaattatcatatttaaattgtttccaattttaatccattgttcactaaatctgaattacattttatgagtcagtatttatcatttaataatagtacattttatattttatatcatgaaatcataaactaaatattagggaccaagttcaattaatatttttgcttgctaatgtttataactaagatattggtatgcccgtatcagtaaatgagtattttttcaataaagaaatataaacaataaaaaaaaataataataataataattcatacttaagaccaactggtttatagctttaggaattttagtttctatagtacacaattgggtatactgtatagtattaatagaactctggtcaacccacagtcttgttgttttatgtttcaaaaacataattgcagtaattatagtgaaatacaaaatgagtatttcagggaaccaaaggtataattttggcccaatcaacttttatttcaccttttttctgtcctataaattggttaaaatataaatgaacagatcatgatgttctagataaaaacatgtggaatgaaacattttaagcagaccatggagcttggataaaagacttgtttcttttgtttgattttcttttttttttttttttaagccttcagcagttacatattgttctcataccaagcttattctttctctgtgttgccaggacagggttgtacacctctctagtaaatgtactaatgcaaaaaagcttcttcaatggatcggtcatttctccatgggtgctattatagcaaactacccattggcttgctgacacactctgtagaaatttcactagaattacaatactacttttaaaggcattcctttaagtttataattgagttagaaattgaatttgtcctttaatttgaaggaaaacagtattattaaaaatgaaaacctaactttgctctgtgtgcttccagccaagtagtcacagatttggcaagataagagggtaatcggatcacctggtatcaccccttcccagtccttggcttgagcatcttcagtgacaggggcagtggttctagcttccactcaccaggcagtccattctatttgtggataaacctctctatatctaaaatcaactgctgaccttagaacttcctcaatagcagtgattctcaaagtgtggtccctggaccaacagcattagcatcacctgggaactcgataaaatgcaaattatcaggctccaccccaaacctacttaattagaaaatctagggggggggcctagcacttggtgctttaattagcctttcaggagattttgatgcttatgaaacttgaaaaccttggccctagagcagtgattcttaaatgtcagtgtatgtaagagttgcctggagaaccttttcaaaatacaggtgtttgagccctacacctgtaggccgcaattggccccagagggggcctaaacatcattacgttataatgtcagctgtctcttatttacccatcccaccatcatttacactgtcttcattagcacaggttttctataactgcctccaacctcttctttaaatgttttcaggtttttggtggcctcgctgatgtgcagtgcccagacctccaggaatggtctggttggctggctcagagcagaccaggactattgccttccttgttctccatactgagcagttagtgaggttgcctgagattacttttttttaaacaaccttattatatgcctgactcagactgagctggcaggcaaccaaaacttaaagtagatttgtttgttttgctcatttgtactccttttgctaagtaaaaaaggcttaaaaataacatgtattgagcccttactatatggtaagcactatgttaggctgcccagaagtgaatcataaatcattttgtcataacaaggtgagatgggctttactaggagacaagttctgggtagttcagtggtagcagacgagtcagacagccttgacttcaatcctatccttcatttattgtctctgcaaactttgggaagttatttaagctctctgtgcctcagtttcctgaccattaaaaaggggataataattttcactacttaacagagttgttgggtattttgataagaggtcaggtacctagtatggggcctgacacatagtaaataaataatcagaaaatctgttgttaatgttcggtagggaagaaatgaactcaaagatgggttgtgaccagattataggtagagatcttatctgtagaaaccttatccttcaaggtttttttgcctccagagcagggtatgagaagagcaagtctcagtgcctggagctggaatggtggcattggtgtcaaaggagctttcaggagcaggagcttggtgggaggccagttccgactcctcctccaggaagccttctatgaataactttactcggagcccatcttttccccaccaaaagggattttcgttgtttgctattatttcgtacttaagacattttctgatgattattctcttctttcatgtttttcttaattagatgataatctagggcaggggtgttgtaaaagccagcccatcttttgcttctcaggcccctcctaccctagccctttacctgcgggccctctcagtctccctcacacccacactcttgacatcccgagctctgagatggccagtcctgatgagggaagtcttcccagctaaggatggtttgtttcgaaagtcattcttcttttaatatattttgtagtagaaatttgattatgtatatgtatatatttaaagtgcgttgtagaaggctatgatcttctaaagcaggagtgtatttgcatgtaaaatgtggtcctttaatggtggatttttaatcaaaatttataaagaatgtggttctttgatttatttgatttgtttaatcaataatattagtatattgatggatattgcagactcctggaaacatgaagagatttttcacatcagcctagccaagaagaatttgcttgggattacattacttctccaaattggaaaggaaaatgctacttcccttgtacttaatttgcagagctgaagattttttaaactgacataatgcaaattaaacaaaacaaagagacctgcagattttatctaagtttcaagattagcatgttacttgagctaaagagaaaacttctcaagtttgggttttggatagactctaattaataaaacttaaagtttagtttttattttctgaggtgaattcttggagtggttcctcaggttaatgtttgttttgcccattagtccaatgtcacctttcactggaattaggaaattattttcccatactgtgtttttcaccctaaaccaaaacaaacagtaactgccttagtcctcattcagctgtctcagcctcctgtgctcagaggccttaatattttccccagaatgcaacaagacatcatttcattccattttatcagttcctcagttttttttttcaattttgaatgttacatcatcattagaaataattaatgttagttcagtgcatcagctgtacacgtaaatgttcacgtattttcgctgaaacaaaatgtgtttttgtaaaaatgtaggataggttgaattgagtattttagaatctaggtagttgatttcagggccagatgctgtttaaataatgtgaagtaaacttgttgactcttctaaatgcctgcttccttggcagacggtcaatgttgaactgaaagtgtggtttgaattaaaaatggtcatttggtaggatttgtaaccatatttggcccctgttacgatataagagtatggtgtgccagacacacaggcctttgcacctaaagggagttctgctcacgcctggatctaacatgtgtctgacatgacctagctgagctgcagtttcttcagttgtaaagcagacaaagtagctcctaccttatggggtcagcatagaaatcagagatgatattgtagatgtcaaacctagctttcaacccctagtagtcactctgtcatttagatcaagttatttaacctctctgcatttaactttgatttcctcatctctaaaggcagatgtaatagtagttcccactctgtagtgcattttctggaacagagcaagttctcaatgtgtgtagtgatggttgccattgttgttttcttcagttcctgagatctttgtctcactctcaccttgctgcggatggcctagaaagaagcccatcctttcagctgttgctgagtccttggccattacttggaggaagtgggatcagcaagttactcatgttgtaaagtgaggtggtgtaatagtgcagccgcagtgaagacctgtccctgtgccagcactgttgggatggcgtgacactctcaaagaagtcatcaggataatgactccaaaaattaacacttgaaaatttgctagtgcttttggctgccttgaatcctctcctgattttactgtggagtataaaatattaaaaattggaaagtgcttcttacatcccttatcttagttaggtaatcttctttgtaattgcagaaaaaagtcactgtccccaatttatagataagaaagctgttacttaaaagtgttcaataatttccccaaggtctccaaattgatgagcaggattcccaaagaggctacactgctaaagagtgttaaatgctaccacagttttcttggtggtggtggtggtggtggtggtggtggtggtggtggtggtggtggtggtggtggtggtggtgatggtggcggtggtgtgtgttaaggctaggattatatgcctaggagatactcagtgaaagattagagaaccctagagctaaagatataaagaacctagtacttaccaaaatactagggaggctttgaggaaggaaatgaatttacaacagaagccaaaaatcaaatctaaattttttttatatcttgatacttgtatcttctaaactatttttaaattcttataagtgatttaaatctcttagcattttttttcttgagtatagaatagaacaacaatcttaaggaactcattacctcattttcttttgtgtattaaagtagctaagagctattcaggtggcacagagcaaagggtaggatcacctagaatacaaggtgagccagcagatggcagaaaggatcttggcctctggaatctaggaatgtttgtacctagagtaaagggaaggaatggtggtttggacactggaaggaccttaatataaaccttgtaggtgaggaaatgtgttacactgttgaagaaagactaaaacttaatgtccggcttaatttccttttcctgagaagggaaagaggatagtaatttctaccatcatgatgactgcctttttaaaaagatttttcatttccagttgccgaaaaatatgttacattccaatcatagaaagaaactcttctattaataccataaagcaatcttataagactcatatgggaggcaaggaagagttctaatctttcagtgttataccgagagacttatattgctttatctacaaaagacttgatgcagccccagtgtaatagaatctgggaaaagtaaggccctttgtaatggagtttttgctctgctttatcagagatgagtatttactacgttccaaactatgaggagatatttatctagttttaggtgattataagtagagctgctgtaaacatttgtgtgcaggtttttgtgtgaacataaatattaatttttctagagtaaataaatacctgggattgggattgctgggtcatgtaataagtatatatttaaaaggcaactgttttcctatgtggtgatgccagttttcattatcactagtgaaataggagagttccagttgtaccttatccctgccagcacttttttaacataatggtattacattgcgaatttagtttgcatttttctaatggctaatgatgtcaaacatgtttttgtgtccttatttgccatctgtattccctctttggtggagtgtctattctagtcttccgcccatttttaatggattatttccttaactgagttttgggaggtcattatacattctggttacaaatcatttgtcagatgtaatattggcacatacattcttccagtctctagttattttcattctcttagcagtgcaaaagtttcaaattttgatgaaatccagttttttatttttttcttttatgtaagatcatgcttttcatgtcatatccaaaaactctttacttaattctaggtagtagattttcttctgtgttttcttcttaaaagtttaatattctacatttagatctgtggtcccttttgagcaaagttttgtgtaaggtgtgaggttgaagctgaggtttattttcctcctattgatatccaattatttcaacaccatttgttgaaaagactgtcttttctccattggattgcttttgcacctttgtcaaaagtcaattggccccatttgtgtaggtctatttctggagtctctattctcttgtattgatctaggtgttcttctcttcactggtaccacactctcttgattactgtagctttatactaagtcctaaaatcaggtagtgtgattcttcaaactttattcttatttttaaattttgcattagctattttagttcctttgcctttccacatcactttatttttttaatgtataaagaaaagagatttgtttggcttataataaactgtaggctgtacaaaacctttggttctgtaggctgtacaaaaagtgtggtgccagcatatgcttctaatgagccctcaataaacctttaattattcagtcctcctaggcctctggaggagagggtccatgtctccaaggtttgtgaaatgccctttaagggcttttccccattatcctgaatattagtaccaggctcccttttaatcctgctaatctctctagcaagtggttgctctacagactgcattgattcttctcctgaaagtactctttccttctctaccacatggccaggctgcaaattttctaaattgttactctctgcttcccttttaattataagttctaactttaagtcattcctttgctcccatatctgatcataggttgttagaagcagccaggtcacctcttgaacactttactcttagaaatttattttgccagataccctaagttatcactcttaagttcagccttccacaaagccctaggacatggaaacaatgcagccaagttctttgctccagttcccaaaagttcctcatttccatctgagacctccgcagcatggccttcactgcccatatttccatcagcgctttggtcatgaccacttattcagtgtctaagaagttccagactttcctgtcttcttctgagccctccagactcttccagtgtctgcccattacccacttccaaagccagttccacattttcaggtatctttatagcaaccctctactcctcaatatcaattttcttttagttcattttgtgttgccaaacaattctcccaccacaacctcccaagtactgggaccacaggcatgtgtcactatgcccactaaattatttttttgtagagatggagtctcactaggtggcccagcctggtctcaaactcctggactcaggcaatcctcctgcctcggcttctcaaagtgctggaattacaggtgtaagccaccacgcctggcctaaaataacattttatatatacattttaactcttcgattttaaattcatggatgattaaggtaatatgtttcttatccataactctgtgctacacatagcaaacatccagctaagatttttgcacatctggatgccatcccattactaacaatatctgcatgcttagctctagataaggacttgcagagattgttggatgaggctggcaaaagggagacatgaaatgtcctgttgatgagttgtcctgtgtttttgactctgaaggagactcatttgttcccccatttcatttactcttgatagctcacctacttccaaaactgaccatgaggtagctaaacggtagctaggacaaaatataaaagcgtatctttaagatatcttccctgagacaacaaacctattttttttaaattaaagaactaagagatatcttgctaccgtgcttttttgctattttttttttaaatggagactatagtctgtccactgagcaaccccgtgcttctatttgtcttgagttactttaacttgtttttcttcattctatgttattgctttagggacaagtaataaatactatgctcaatgtttatttcgaatgaagaattgctgctgctttaacctgcattgtctgtattttttttttcctttctctaggatcagaattcaggctataaatgaaattggagctggaccatttagtcagttcattaaagcaaaaactcggccattaccacccttgcctcctaggctagaatgtgctgctgctggtcctcagagcctgaagctaaaatggggagacagtaactccaagacacatgctgctgaggacattgtgtacacactacagctggaggacagaaacaagaggtgaggtgggggtgaggatgctcctgaagcttctgtagctttggcttgtgggatgaaatctcaattgtacatttttatttgcttgcactaagaccctcttccttcttgttcagaggcttcctttgacttgagccctgcgttttatacccggagtcgttccttttattctctatttggaatttctaaacattctaaagatcctgatttccctacatagcataatatgcacttttttttcctttcatcaagccagataatggagagaaagtatctaaagaaaattgtcaaattcaagttcacactatgtaatagcattatattagtcatgagtgcagagggaaataagacccaggaagagatgttacctctttaaatattcagtaaccatcaggacaaacatgtttaccaatgtgaaatagctgtgggtgatgtacagatggggactgtactctgtaactatgggcaatgcaatatcaaattaaccagagcaaataggagattcttcataaaactccatacccaggaaacattcttggctgtcaaaatcaaatgtagcctttcacgtagtatttgtttaacctaacttcatttcctctgaaaatgtccgatcagaagacagccaaactgtatttagaaataatccaatgtcaagcaaaagttaatggtgacagaatgttctgttaccaaaagtcctaatcagacaatcaggtaaagggaatgggagatcaccataaaaccaaaacaaccaaaatgctacttccctgcttacctactgacacacaaaaccagtgtcaggatagaagcatttctgttatttccttttatgcatgatactattctgttccttcacgtatggaacccattctagttacacggaaaaccctgtcccagtctccaccccctactctgcagtcaagcactttgatggatttcagtacagtggagtcctgtgggccttcagtggagaccaagattagaaatcacataagaccctacctctagaagcatagtatcaatttttaaaatggccatagaacattagtgtcagaggaaaaaattgctttgggagtttgaaggaggcagagaccatctggtttaaaagatcaggaaagatttcttgaaagaggtgacatttgagcttgactttggaggacctggcaaacctggtaatttttatgacagaacaaaacgtgattatcctcttggaaattagttctagtgaagagaacacaggggaggtaaagcttcttttgataggttcatgaaagattaaattcatatccactgatacacaagagcattcatcttattgtgctatatgtgccttcggatgtgttttcatgggctttttattttactggctagggacaactcaacaggagagggctggcaagaacagcaattgtgaactaacagaaatcacaatccatgtataaaaaaactagcattgggggaaatttttaaatgtcttttcattttttcccagacctgtggcttccattggtggtaaatccttagaaaatagcttctagttgtgctgttttagaaaaaagtgaagcacagaaaagttgttgaaagtggtagctagctgagttgggataaaggccagtgcctcccaattccccgtgccctgcctccactgccatcttagaaatgtgggaagtgaaggctctgccccaagggcaccccctcttgctgcaatcctgccctgtgtggggcagcagcccactagtgcctcatagggagaactatacaaatgtgtagtctgatccaaggttttccatgacacggtggctcctgggcaaagaacaaaagctccccaagcacttttccaaatgaggttcctggcatgaggcatttaaatatgccagacaaaaaacagtgcagaatctagtaatcaatacatgttgtttcttcccccctcaaaaagcccaaggcttgcctaatcaaataaatgacttgcctaaatttaaatggcaatttaagaaaacttcgcattaggaacagtatttttcttaattacaggagctagagtccaaatttatctttttaaattagatttgtcagtgctctcagaaagttattaaagtgatgggaatatagagcataataaattctcattctatttgtgaataattttcctgagatttaatagaatgaaaacagcctaattttagtttgaagatgaccttcctcagtgtcttgaaactgaactcttgtagtgagtggccttttgaattcaagcctttaactttggatcttggcacatgggtatcaaggagaaacaatttgagttggatacatcataatactttttattagcatagcctttgtcaatctagcctcctcaaggttctttaggacctggcttctgcagttgaaaagaacagtgtcttcctcccaaggggcagctgtctttttcattgaacttgttgctagaggagcttctagttttaaagcacatactctttagcgtatgtgttaatttcattaaccaccagtaagttcttcttatgcatgtggccaaaataatgatatatcccgcttgtggccaaggtgagaaccatagataggcttgttattttacttttctttcttacctgcaggctctcaaagatattttttctccttaagtttgagcatatttcatgtaaataaaagggatcccaaagagcatcttgtgcgaacccttggctcaagacaacccaacctaaaattcatctagatcacctggacttttatgttgaaaggatttttcccccagaataggacatttgtttcccatctattctggcttacaatactgaagagtcccagtccatatttatgaaggaagcagccttaaagtgttaccatgaacactttataaacaggcattgtgggcctttgaaaagaaagctgctgatgtctgagttttatgggagtcctagccagctgtttaagtgttcttcttaacacttaagtatattttgtaacagaagaaaaatgaaaattagtatatctgcgcttcataattatcatattaaagagttgagtcgattttagcaactaaactattgctctccaaatttccttaattcattaaataaaggggttaaactagaagacgatctctgatatcttttcaccttaaggcaacaaatctttgtagagtatttgtgaattaaatcctttatgaaaaggtgtcccttgtaaatgattggggcatgttgcctcttttccttcatatttttagtttctgctattcataaaaaaataagaaaaatactaacttcccttaagagtaactacttaatgtccaaaaacccctcaggttctgcaactatgatgcactgatttatgatgtttatttatatacctctcagaaaatttgaaatgaccaagagatttacaaatgcaatgttcagccaaaaatgtttttaacattctaaaggatacttatatttttattgttgttgttttgttattgttgttgttgtttttacagcctccctcccaggaaacttggatttattgcatgcctacaggagcgctaagcattgagagctttgtctacattatttagttcttgagtaaaaagggaaatattttctagaaagtagggtttgtaccaaagccttctaccatttaggtgaaaaaaaaaacatagtttctgataagttgaattgatttcaacttacaattattggagttttatatgtcaaatagaggcactgcttcagtattagatggacaaagatgactaagatccctgcccttaaggaactcacagtctggtgggtaatggtagaacacagatgctttaaagcaaattatgatgtggaaggcctaaagattgacacatgcacaaggtatagagggaaaattgaagaatggcatctaaggtaggcttaaaatcaaatgaacacttcttagaaaagatgacaggttgagtgagtcttaaaggatgccagtcttgtaacctcatgcctggggagcattgggatggagactagtgatgaagacttgagataggatggaaattacaggcaaaacctccaaagtatagaaaggtgccctgagtctttctccaagtaactgtctctattttgttattttcagacctggtgctttctttccccttaagtttgggcatgtttcatgtaaataaaagggatcccaaagagcatcttgcccaaacccttggctcaaggcaaatcaacctagaattcatctagatcacctggacttgctatgttgaaaggattctacccccctgggataggacatttgtttcccatttattctggcttatgatactgaagattccccatccacatttataagtggaagccacatatataaggcaggaagcaagccttaaagtagtgcttcatatttatagaactaagttcatttcaatgataagattatgatcattcaatcatcgattttttttttttcttgaattactactatgtgctgggccttatgaggtatgtggactatctatgagagcttatcttgctaagggagataaattaacatcaaacaataagcagacagtaaaacagacagcagacagcaaaacaaaaattaaattagtttggccttagagtgattaagtctattattcttaacagatccagcacagaagatatgaatgtctttggttcccgtgttatacaagaaaaatatatctccaaagtaaacatttccataaagctgcattaacctcatacaggcactagaataacaggatcagcttgtgcattttaagattgtagcactgtgccgatgactttgaagatgcgtttatctgtgttaaatgaaatgttatgctgccctaacagaatcggagttgatgctgcttcctgtcctgacccctgtgggtctgtgttccctgataattttacacaacactgaggcgggaagaacgtaaattccaggaatgcatttatggttaatctgttgttgaggtttagtcagacagccagtgttttataaaccaagcctcccatgaaattgggctggaggaagagggatctaatagagcagataattaccacttgctctccattaactcagcccttgtgcccgggacacttttccttttggccagcaaaattggagtggctttgtcatgtttacagggagcctgcctgttggctattagagagggacagaaagaatctgcatatagaaaccctgaaagaatacacactaggcaactaataaaaatggtcgggaacctgagcagcatagtgagaccctttctctaaaacaatttttaaaaacttagccaggcatggaggcacacactaggtcccagctactccggaggctgaagtgggaggatcccttgaacctaggagtttgaggttgcagtgagctgtgatcgcaccactacactacagcttgggcaacagagtgagacccagactcttaaaaaaaaaaaaaaaaaaaagtctggaatatatgggcactgaggaggtgtgagctttctcagcgtatgcctattatagaacaaactcctgcttacatttatcagaccatgttgccaaattaaatgaaacagatgtgaggcagccagctcagggccaggcccttaagaaaccctcaggatttgtttccagtgcttctctgactagtccccgatccatataatcatcattgtttgataaatgacattttcatatgacatccaccagcaggctatcatgattctcgacatgggtatcaaatctctgttgaaatctcagaactgttgctgggtttctaggtgactagaggcatatcccttcacttctttttgccttaatttcccctactacaaaatgcaaataatgatagctgtcttcagtccttaattgttggggaaaaaaagattttagaaacattcttggccagatgcggtgactcatgcctgtaatcccaacactttggaaggccgaggcagatgcgtcacctgaggttaggagttcaagaccagcctggccaacatggcgaaaacccgtctctactaaaaatacaaaaattagcctggcatggtggcagatgcctatagtcccagctactcaggagcctgaggcaggaaaattgcttgaaactgggaggcagaggttgcagtgagccaagatcacgccactgtactccagcctgggcgacagagcaagactccatctcaaaaaaaagaaagtaacatttttgtttcttagaaaaggagcataacaatttagcctttgaaaccgagtagcttagtcaatcttaggctaaaatatccaggcacagacagaggtgagaggtggcaaatgaactatttgagatcttaattggaccagaaatagaaggcagattacagttttacctctcatttactaaaaacaaaaataacagaatggaattagatagcatttttttcaggttgaaacaaggccactaaaacattagtaggcaaatagaaatttggaaaactctgggaagagtatccttgaagatttcactgcatatacttgaaagcaaagtaggagagtgggagattgcaagcttttcaggtggtctttagaaattctagtcatcctttttttaaatataaataaatctccattttaatacattaatgtctaaagtataccgaaaaaaaagtttttttttgttttattcctttattctttgtaaagaatttccaccatcaataggtatagtgaaattttatctcttagaaaaggagcataaaaaaattccacccattaatgaaacagtattacaacctgatcactcacaagccaaaaaaggtccatatacagccagggacagagggttaggaaattaacctcttttctcaatagctgttggcacgttcatgcttagtcggtaaacggggactcttgccaacatcaaaatcagtttaggtattgcaccttccctgcctcaggtgtccccacatgatgccatctgcttctccatagacatggtcggactctgtgttcttggcagagtgagggcgaatactatccatttctattttgagcaccgttcgttcccaaatgccacctgagtaacatacgaaattctctctctctttctctctctcattcatacacatacacacaatccatggagcccagggaaattaagaaaaaaaaaaagacatgtcatttttaatgaatattgctgagctgttgatttgtgatattgtgaaacatgttttgaaaggtaccatttgcagcctttagtagactacaggttattttaggtcagcaggttagagcattttgaggagttaatattaatgtgttgctgtgagcctgtagttggcctagggattataagataacaaggtagtaaatatagaaacgttagcattatctcttattttccatcataaatttaagttataggccagttagagcattcttggattttttttcaaaatcaaactgttttaaagaaacattctaaagctaaattcttcatgtatattacatttccccctatagtgatttaaaataaaggaacatttaaagatttaacatgatggaacttcttccttcagttgcacttgagtgcaaaaaatcaactttcacaatgttaaagcctaaaatactgaaattaaaagtatagtcttccccaagaatttctggaaaatgcccagaatctgttgtttgcctttctagtgcatattcaataagaagtcatagaatttacttcaatctcataaaagttcctgccaagtgaacaagacagctgttgtctggcagttgagccgtagagagttatgtgacttgttcaagtttacagtgaaggtaataatctctgcattctggctaaggtctgtgtgtatctttttgctcttgaaagcttgctctgtcccgccatggagtactctgaccggcaagcagaataaaataagcagtcattgggtattcacaaacacatagaactttgtttttcatttttaaatatctttattttttagagcagttttaggttcacagcaaaattaagctgaaggtacaaagataccccttatcccacctaccccaacacatgcacagccttttctattatcagcatcgtccaccacagtgggacatttgttacagctgatgaacagacattggcacatcattattacccaaattccataatttacgttagggtttactcttggtgttgttcactgtatggatttggacaaatgtatgatgacgtgtttccaccattatagtatcacacagagttgtttcctcagtatctatgggtgattggtttcagggcaacaccctccccccttgcccacccccacaaatccatggaagctccagtcccttatataaaatggcatagtatttgcatataacctacgcacatcctcctgtatactttaaatcatctctagtttacttatgatacctaatataatgccattgctacgtaaatagttgttatgctttagggaataataagaacaaaaaaagcagaacatgttcagtatagatgcaagcatcctttttttcccccattattttctatctgcagttggttgatccacagatatggaacctagggatatggagggctgactgtgcagaatgtttctttaatcattggtaaatcaccaacattaaaactcatgcgtgcttattgccatccgagtgtcttgtttcaagaagatattacagtcaaagctcaaacaagttatgggcagagccatcaagaattcatttagactgtaaacttttaatgacccacccaaccttctaaccagtttatttcccctttccaagtaaatattcttagtgtaggagagcatttctccccatctttcttctctctaagtaaaaatgcccgacgctatgggcagtgcctagattgggcgcattgccccatcttggtgtttgcagcaacagttcttagcctggactcaccaggacagggtgatcttggtcacatgcccagctcttctctccaactcaagaaaacctcatggagtgaaaatgagagggatgccattctgaggactccttcagcttttccaaccttgtaaaacagactcatgagcattggtgctttgttaataatactcgtgttagaaacaataatatttacatagtattaaaaacagtagtatttatggaacatttaataagtgctaggcattgtctagtgttttccttcatcatcccttttaattctctcaataatgctacaaggtagttactcttatcgtacccactttacagaggaggaaacaacttacctggttatagaacgcaccattaccagactgttgagcctgaactcagacccaggccagcttactgcagagcttatatcatcacccagtgtgttgtatccaaactccctgcacagtggagccccacaggtgttactgtgcttgtcctcttcttggtcctcacaggagcctgggtcatggagctgatgcctctgaagcttcatgggcacaggcagcaggggatggaggtagagtagaagacccctcagagatattgccagcgtgggctggggctcctgtggtaccataagggttgcctgtagctacatatgcctcagcctgaactcatactaaaatgactcagtgactttattgagcatatggtatgttccaggaaccgctatatatacattattccttgttgcttttgtcagcaagcgtgctcatgtcatgaaaataacaaagtgagcattttatttgtattccttggccaccaaattagatgagtgatttatgttggggagaactaaatgtctggcataggctgtaacagaacatcacagatttagatggacatgttcctgctgggtcaaaagctgtgaatgaccccagtagcctggggagaggcctatatagcaggaactgggagccagaggtcctcaggatacaattcagatccccaaaaggtgacctgtggccttcctggtgcagagtttggggccattggataatgccatatgccaggctcttactgtgtcctaggctcagtgctgaggttttaccaacataaatattgcattgactcttaaaacaatctacgaggtagatgctgtgcccattttacaaatgggaggaactgacacttagcaggggtgaatgatgtggcagtaaagcgcagagctggttagagcacaggtcttcctgggtccaagtccctgtgctccacttcctccaccgacagtgtcagagttacagaggggagtgaaggatggtccagtccttctcagcagcctagagcaggggagcagcccagggttaagcaggtgtgactcctcgtggagtgcatccctatttcctgagccccactcgctgttagaaaccaaggtattgagggcttagtgagagtttttcaccatttcctgctgctttaggtcctcccatttccagttgttttcttcctactccagggatctcctcccttccccagggttgaagcaatgcacactgaagtattaatagtagtgatcagcaccttcaagacagcaggacccttctgttgccttctggctgtggtgtgatgtcctagggcctgtggtgcataagcaggtggaatctaagcactgaccctggtcattctacatataagaggaagaggactaggaaagctcgacaaatgctgttctcctcttcatggcaaagccttgctctttggaatccttatctgcatttaaaatgtgtagtcttcaatcattgtgtcttgggatgcttggtatatttagttccatcacaaaaggcctctggcttacttattaatgaattctgaaattaagttgtcttttaaaaaagatataggagcaagaaaaaaattaacttagtctttgtaaaacaaatatttgatgaatatttgtaatctctccctgagtggttctagccacaggggtgttaacctacagagcttcctagaaagagcaccatacaaatggccataaatcactggccccgaagaaggaagattctctcttattttgcctcctggaatgatgggaaataattatagaactgggatgaaagaggaattatattattcttgtgttggcatatgtgctttttattatgttttggtaggtctttattgtctgatattggaggagcaaggggaaccagacattactgtcagcatgtacatttcatgctagggtttaccagaaagaaacttagaatcaacagttatctgaggcctgctgtgtcagagcttggggcttttatgtgagccgtcaaattcagacctcaccagtgtgttccaaggaagcgtctctgcctgtacttcactggcaggacccgcctgagggagagtaaacagcctcacagatgtagtcccacagctcatgtctgaggccaacatggcagcctgctctgcagggttgcctcttaccatgcggctgactttccacctagaaaaaaatctgtgttagcagtgatgtccgtggtctctcagaacacacagggagtcctttctaaaaattctgtcttcacagcattaagatgattataactaacacatattgagttattatatatcaggattagcctaagcactttgattttatttatttacttattttatttattattttgagacagagtctcgctcttgcccaggccggagtacagtggcagtcttggctcactgcaacctctgcctaccggattcaagcgattctcctgcctcagcctcctgagtagctgggactacaggcacgcatcaccacgcctggctaatttttgtgtttttagtagagatggggtttcaccatgctggccaggctggtctcgaaatcctgaccttgtgatccgcccgcctcggcctcccaaaatgctagaattacaggcctgagccactgtgcccggccagcagttttcttttattaacccatttaaacctcacaatatctctgaggttggttccatcatttcactgattgtacagatgagaaaactgaggcacgaagaggctaaactacttgctggtgtttcatagtctacagagccaattccagtctcagaaattgcatttactgagagcctaccaagtacccagatctttagggggtatagaagaagtttaactagaatctattttcttatgtatttaatgaatttttttgttgtagagagtaaaatgacatgaaattggaaatgactgtgataaatgattttcatagtataaaaattggtaccaagtctttctcatccctttcatgtcatggtttcattcttgcagttctctttctattcttacctcttttatttccttaagaagaggaaagggtagggaaaacctttaaagtgaggaaggtgtcagctttttaataatgtgccaacttgctacctctgtctttaatgtctccctgtggctcttggtcacacttcagagtgagatgactggagaaagtcttcagaaggcattagctatgatcatcttgcatcattgctcagcccttctgaccttgggcctgtgtgttcatcttagggcacaggccccaaaaggacagggtacatcagtgtttctagatggcccaattgacacttgatgctttcctgccttgggctgtttcacccaaagctcttaggattccttatgtctccccttcccaccttatacttgtttcacccaggaaagagcctctgtcatgcccatcgtctccttccctcctgaaggctcagtatctggttaattacatgacataggaattacttaccatctattttggctatttccatacacattctgagaacaaaataaaagagctcttctccatgcccctctcataatttcttcccatgcccttttttggggaaggcaggccagtcaaagcagtgatggctttgatcagagcaacgagcagatcatgatttattattgccggagtagacagtgggctacattagaggactgcttagacgcatgcttattctagaaaaggctgaaggaagaaagaaccacccctttccctcctcttctcagctcccttctgctgggagcacctggctgccagttcccaagttcctctccatggggaattgcagctccaaggtggcctcctggagctgcctaactccgccttcactgaaaataaggtgattgaactgtaaagctgaaatcctctgcagtcatgtctcctccagagtcttcaaggtcactcccactttttttctagacacaaatggggtcatttttgtaattctaattaacactgtctccagacataaataaaattttaaatttctcattgctatcagctgtttccactatgtttttcataaattggaatgcaattttaaacagttaataaaattctccagtacaagagcaaaacaagaagttaaaggaacacaatagtctagaaacagaagattttgatgtatttttaaattgatatgtatgttatctgttctatttagattacaaacttagagtaatgaatttgcttcagtaaatttctttgtgactgtgagtgctattgcttatattataattgggtctgggtccaaatatatattgaacttattttccaaaagaaatactctccttagattgtggcatggcaggaaagcatactgttcctagtagtcctctccaaactcctttaaaaactgagctttatggcaaatttgtaatgaagatgtaacactttcactacttaaaccatgacttcaatttgtgatataattaagggcaattactcctgttagagattgtagactaggttaggctgagttaataaatagctgtttggctctggcattagcaaggatgtcttcattagggtagtaatgtgtcaagagtgctaaataggttgccatggtatttgtgggtttcagcctggactctggctttccctgaaattaaaaatgttcagcctttaataaaaggcacttccttacacagcaaagcagacagaacactaaataggtgaaatgaccagggctcaggaacttgattgcagaggctgatgaatacacacgtggatattttaaagtaagcattgactctgacaggctttgttaaaaaaaaaaaaaaaagaaagaaaagaaaagaaaaagaaaagaaaatgttttagatctgtatctcttcatttttccatccattcatccatccagagggactgtgctccagcacatggaaaagctgctgccctgcttcagaaaaccttgcccacactcaggaccagctaacgcacagggattaggtcttattcatctttcaaatccgcagagcctagcacacagcagatgttcaagaaatgtttgctaaatgaatacataaattctgcttacccctaggccaaattggcccaagagtcagacattttggattatgattttgttagtggccaacttccagtatctgaagacagtggattgtcctcagatgctgtgacgaagccctggaaatgtagaatccattggcctgtctgtctaggaacaaggcgttgtggttggattaacttatgtagtggttctcagcgtgtccactggaccagcaggattcaaatactgaatctactaaagatcctggatgacttatgggaagttatgttatttccaaaattttacagttaaactatattttttaaaaagatgacagcatactgtagttctcaaatatgtttttattgtgaaaacgttgttttcaagaccctgggggaaaacacctaaaacataaggccttgtttgtttatctgtgtgcctgttatgcttaacgtttcatggaaatcttaattagcagagaagtgtaaaatagtcctggatccgatgggggaaggagccaaaagctgccagtccaaactgtccagcccacctgtgctgtttgtctgtgattttgatgaacctgatggatgattctgaacacagcatttttttttctttttacatgtgttctcaacgatccataatcctaaatatctccttagcagttgaggaatggggctttgaaagctcttggtaagatcgataaaagttaaaattaaaagcatttctggccaaaccgcagttatttgcaaaatttggctaaagaggaccttatttctcaggtgtcctgttaacattaacttcattgcctagtacatagtagaagattagtttacactaccagattatagatattagcattatgaaaaatttgaaaattctgttttttattagtaaataaaaacatgagcaactgatgtttctagaatctagatcctaattaaaggagtctcattccagtctttatatgtgcttaagtttatgtttttcttttatcaaaacatacatttagacattaagcttaaccctaatgtagcaactggctgattattaattcagaatgtatggaaagcgtttaccaggttggcctaatctgctccattagtttgcatcataattaatttcttgtcattagtagacgttcagatggctaattgattctgctccttcttctaggtttatttcaatctacagaggacccagccacacctacaaggtccagagactgacggaattcacatgctactccttcagaatccaggcagcaagcgaggctggagaagggcccttctcagaaacctataccttcagcacaaccaaaagtgtcccccccaccatcaaaggtgtgtagactatgtattctttctcgctctcttgtgagagtaaggaactgttgggacttatagaaagaagctcttttctgatgttaaatataatgtcagcaagatagaatcaaaagaacattctaaagaagattgagcaatgatgggttgtctgggggaaatgagagaccttgaaaggaaagggcctactgatgacttttctctgtaggtatgcatgtttatcaaaaataatggttagaaataagggttaaattcctggtgctgcaacccttaagacagtttaccaaggaaggcgtcagactcccctttcctagactttcagagaagcagaggttggcattcatctttcagtgactttggtgcctagagactgacttaggcaacttcagcagcctttctcttttggcgcacagctcttggtgtggagcactgcctttggaaagctgtagcagcgttctgctctaatctcctggggtacttatcttgaagtttcttcaaggatgactactttcctactctggccccttaatgggatcaggtactgcagaagttgtgagagccccatgtatccagatcttccccatatctctcgaagctagtgaacaaaagacactctgcctggacccttcttccaccgggtctgctgagccctcagcctgttatatagccacagagctatgcctgactgcggctgacttgcaaggcaggaaatagcaatagaaaccatagcatgctcagcctgtccacccagccactcatggactcctgaggccctgcctcatctcctgcaaatactgtggttcttgtggaggtccctgcagcttgtcttttaggggacagacagcacaagtggcttatcgagctattgctcaaaataaccctaaggctgacagatagcagggtaagtacaacctgcacaagagatccttgcatatgtgtttgactctctactcccacatgaaggaggtgtgtcagctacaaccagggcacaaagtcaattataggaactttccaggacctgggtcaggatttggcttggattctacgaacctcatagctcctttcaggattagtttagggtaaataccttcctcctgcttccctgccctgcagactctttggcagacccttctttatgtgactaagacatgagtatgaatgtgcatacacatgcacggccttgtcaggtcactttggcagtaaatgccctggccctttggtgcagctttgcctttcagttataacacaaaagatgtctgagcacactgtggctgctttggtttattagtaccaaggaagggtggccacattgatcagttatcccacttcaggggtctttctagaaagtatgaaggagtactatctttgcctctcaaagtgattcttggtggggattcattttacaaaaaatacaatggcacattgatagtgcttgcatctcccagcctttctacttcagaaggtcagttttcccactctgatgcatgatcaggtagtcttcctctcactcttagactcaggaaattattgtcatagctggaggacagtttaatctgataggcttccttatttagttttttcataaaatgcttggaattttggcctagtatttccagcgtaggctccttttcttcttcttctttttttttaaggaaagcattatttttctgaaacaataacacacagaattgcaagcagaaacaactgtctctaaagaattagttgcatgtaattagggattaaagtataagggggttcagacaggagatatacattctagttacaaaataggaaaatgtcctattgaatcaagctgtagagatagaagttatgaaaatattttttaaatctagaatattttaagtgccttactgcagactaatataatttagctttaaatgagaatgaggagttcaggaggtgaaaaataaaatatatataaatataatttaatttttaaaggctttcaatgctgcccattccccaggactgttctcacatgtcacctgctcctcaaactttccttagaccctcacccaggtatgctcttttcctcctctggaaattcccaacgttttgtttgtacctctcatttttattccctgatgtttctttttgtatgcgtctcataccttgctctccccttccttcaactaactcttaagtttcttgaaaacagggtttaccttgcctgtttttgcatcttccagaatacctaggacagggcctaagccatagaggatactcaattgccataggagaaaaaaagatgtgatccacatcaagctgttattaatgggataatgggcaaaggatttttcatcaatggctttttagtcatggagtaacttctctgtgcctaaagggcaccctgctggttttatgagaggctgggcaaatcagctcctctctcagggcaaacacaggcacaatcttgctctctctgggttctcactaatagtgctaaagtgttgactattaacatgatactttgaattttgagcttggatgtgtggatttgtatttcagcacctcgagtaacacagttagaaggaaattcatgtgaaattttatgggagacggtaccatcaatgaaaggtgaccctgttaactacattctgcaggtattggttggaagagaatctgagtacaaacaggtaagaaccagtgtgcatggcacatgtgcaactgagtatggctggctccatgcctctgcttattgctatgaatgactcagtgaactatgtttttcttaaaatcagtgatagaaactgcctaacttgtacttattgtataattcttcagagtgggtgaaacctagtttacatttcattttatatatggtggtattcatcttcaattttcagttctcaagcatatgtttgtcttaaagagttgtaaatcgtttatttgtatttgacattgatggtgaggtttgcaagcatcaaagtcagtatgtaattgaaaactaaagtgcctgtgattttactatagagggaagtagtctctttttttgttgttgttagtattgatcttttttttttttcattatactttaagttctgggatacatgtgtagaatatgcaggtttgttacataggtatacatgtgccatggtagtttgctgcgcccatcaacctgtcatctacattaggtatttctcctaatgctatccctccccttgccccccaccccctgacaggccccagtgtgtgatgttcccctccctgtgcccatatgttctcattgttcaactcccacttatgagtgagaacctgcggtgtttggttttctgttcctgtgtcagtttgccaagaatgatggtttccacttcatccatgtccctacaaaggacatgaactcgttctttttttatggctgcacagtattccatggtgtatatgtgccacattttctttatccagtctaacattgatgggcatttgggttggttccaagtctttgctattgtgaatagtgctgcaataaacatacatgtgcatgtgtctttatagtagaaggatttataatcctttgggtatatacccagtaatgggattgctgggtcaaatggtatttctggttctagatccttgaggaattgccacactgtcttccacaatggttgaactaatttacactcccaccaacggtgtaaaagtgttcctatttccccacatcctctccagcatctgttgtttcctgactttttaaatgattgccattctaactggcgtgaaatggtatctcatagtagttttgatttgcatttctctaatgacaagtgatgacgagctttttttcatatgtttgttggccacataaatatcttcttttgagaagtgtctgttcatatccttcacccactttttgatggggtggtttttttcttgtaaatttgtgtaaggtccttgtaggtgctagatattaggcctttgtcagatggatagattgcaaaatttttctcccattctgaaggttgcctgttcactctgatgatagtttctttgctgtgcagaagctctttagtttaattagatcccatttgtcaattttggcttttgttgccattgcttttggtgttttagtcatgaagtctttacccatgcctatgttccgaatggtattgcctaggttttcttctacggtttttatgattttaggtcttacatttaaatctttaatccatcttgagttaatttttgtataaggggtaaggaaggggtccactttcagttttctgtatatagctagccagtttttccaacaccatttgttaaatagggaatcctttccccatttcttgtttttgtcaggtttgtcaaagatcagatggttgtagatgtgtggtggtatttctgagccctctgttatgttccattggtctatatatctgttttggtaccagtactatgctgttttggttactgtagccttgtaatatagtttgaagtcaggtagcatgatgcctccagctttgttctttttgcttaggattgtcttggctatacacactcttttttggttccatatgaaacttaaagtaggttttttctgattctgtgaagaaagtcagtggtaacttgatgggaatagcattgaatctataaattactttgggcagtatggccattttcacgatattgattcttcctatccacgagcatggaatgtttttccatttgtttgtgtcctctcttattttcttgagcagtggtttgtagttctccctgaagaggtccttcacatcccttgtaagttgtattcctaggtattttattctctttgtagcaattgtgaatgggagtttgctcatgatttggctgtttgtctattattggtgtataggaatgcttgtgatttttgcacattgatttggtatcctgagattttgctgaagttgcttatcaacttaaggagtttttggactgagatgatggggttttctaaacgtacaatcatgtcatcgaggagaagtagtcttaacctaactactgaagcctacattctgtctaccttttttgtagaactaatggaaggttaagggagatgatgcataggccctggaggcctgtgattcagaagctctaagtcatgcatgtcaccttttaatgtcaaaggaatcacccgggaatctgttaaaatgcagattctgacctggtaggtcttgggtggagattcaccctcccaggtgacactgacattgctggtccatggaccataatttgagtagcaaggctctgtaaatcacataataaacccacataagagagaatgcatttggaatatagccagataagaaattagttttatcatgtttcatagcccttgttgattcttaattcttccaaagaagaatcagatcaatgactctgaaggatttagatactctataggctttcataatagtccctagaacttgtttttgtcaaatcaggatataatattatgtattccattaggaaagctgaggtgcattcttcgtcagcacttttaataggagcgttcatttatatcaaacataaagatgaaaataaatgccacctgttctctgaaacagtagcataatttataaaaaaaactttgttcagttccaaatacacaagtagaaaatcatttgattcagagtttctgttaaatttctcattggtgtttgctatatgataataaagaatattggcaaataaaatgtttttaaaaaaaggtaattttggacattttgctgtactttgttaatatgatgtatcagataaaagatttaattgttttaaacaaaaaactttatcctaaatatgacatctaccagtgtcgattaacatcagcggatgatgtcaccaaagtttccatcattcctcttaaataagaacaaagacactatggttccttttatttttgaatctcattttatacgatatattccatttcagagtaaataacttacatgcgtaattgtttcattttaccagaaagatatgattggtttcgggtcttagctcaaatagagagcagagaatttattctgttccatagcaatgtgaaaatggttaaaatatgaggtgttaagaaattttacaacatatcatttgacgcttaataataattcatttcccagcagtacattgatcacacatttgttattgtattgtaaaaatcttttattttacgtgccgtgcttttccacctgttcttggaaaaatgttctgcttcccaaagcacagtgactgctgtttcctgttgaaaaaagcagcattatttgcttgatacctatacacatcaggcattgccaaactataggtgaatctattcagtaatttagattttattggcagatgatctcttttgaatgttgtctgtttaatgttatatatttagacccatggccatataaatgctaatatactaatgcataatcatatgtatgccacagactatttttcttattataaacagttataaacaaagtgttccttgttgtaaacaggtgaaaacacacagtactgcacggcaggctcagcagatgaggcttagcattctccacatgcccatttgcttcctgcatttaccaagaaatgattaaggagagtagtcgtacatgaaaagccacagttgagtcagggacaatttgtactggtttcttttttttttttctggcttctcgctattcagcaaacattaacttaaacatgatgttttagtacttcattgttctggacatgagctagggaatgaaacatatttatgtgtgcagaacaatggttaaaataattatagttcaaggataacaggcaacaggctttgaattcatagaggcaaagcaaaagaaaatgagaggtaattactgctgtacatccaccacagcggagctacaggctcactgtgtatacctcaattatagcactaatcagacaggacccactaatacgtgggcttgtgttattcatttttatttttccagtactggcatatagtttgacactcagtaaatgtttcctgcatgcatgaaagacgcagcttcaaagcaccagggttatttatacctgcagtggtgacaagagtaaacttcagcatagaaagaaaaaaatcacccctaataggataatatccttttcccccaagaccttttttcttttttttttttttggacagagtctcactctgtcgcccaggctggagcacagtggcgtgatctcggctcactgcaaggtctgcctcccgggttcacgccattctcctgcctcagcctcccgagtagctgggactacaggcacccgccaccacacctggctaattttttgtatttttaatagagacggggtttcactgtcttagccaggatggtctcgatctcctgacctggtgatccacccacctcagcctcccaaagtgctgggattacaggcgtgagccaccatgcccggcccttcccccaagctcatttttataggcgacacatgacaagtgccatggccttttctgatgttttgtttgaagcatcaactctaactttgccttggttctaggtgattcgctttctgtttttcaggtgtcacaatgtggggcaagcagctgattttaattattaaacaatctattaacttgaagtattaaattattactcacaattttactcttcattagattgcatgcacatttggtttgccttttgccatttaataaatattccaagcacagctttttttccaggaagcttaaaacttcttttcaaataggcttaactgtaaagtattctttaaaagaatgaaaattgtgtctatatgcatgtgacttcttattttgtacaagatatagcatagacagtttcatgcatagtaagaagtaaagcaaaacaattcatattcctattcaggcagcaataacttttctaagaagtatttaatataagcattgaagacaaggaaaggatcaacaaattgtgagaaattattacctattggcagtcaaaatttatgaaaaattactgaaattcttggtgctcagatttgttgcgtaaagaaaacctctgggctgggcgcggtggcttacgcctgtaatcccagccctttgggaggccaagatgggcggatcacgaggtcaggagatcgagaccatcctggctaacacagtgaaaccctgtctctactaaaaatacaaaaaattagccaggcatgttggcaggcacctgtagtccgagctacttgggaggctgaggcaggagaatggcatgaacctggaagcagagcttgcagtgagccgagatcgtgccactgcactccagcctaggggacagagcgagactctgtctcaaaaaaagaaaaaaaaaagaaaaaaaaaaaaaaaacctctgaagtgtctagaggtctgtaaagctacacatttaatttcatggtatttctgtatcaatatatttttatcatgtatcatttttagaatatagtatcaaggcatgcattgattctacatggtatcacaaagagtaccacaaggaaagatcttctcttgaccaaactattttaaagtcttggagcctccttttttttgagatggagtctcgctctgtcgcccaggctggagtacagtagcatgatctcagctcactgcaacctctgcctcccgggttcaagtgatcctcttgtctcagcttcccaagtagatgggattaaaggcgcctgccaccatgccaggctaatttttgtatttttagtagagacgggatttcaccatgttgtccaggctggtcttgaactgctgacctcaagtgatccacctgcttcggcctcccaaaatgctggattacaggcatgagccaccacacccagcggctaatttatttttgtatttttagtggagataggttttcaccatgttggccaggctggtctccaactcctaacctccagtgatccacccgcctcaccctcccaaagtgcagggattataggcgtgagccaccatgcctgtccccttcatcatatttttttaatgactttcaactcatttccctaatacagaaattaaacaatgaggctatgactgtctcataggacagttttttatttctgcatgaataaagggtcaaatttagaacaaaataaaaatagatcaagatagacctctttaaaaaccatcgtttattttactgattcttagggcttttttagttttataggtttatttaagtatctgaaggtcatgaccccttatatcagaaaaattcccatacatgtacccatacctctacttaaaattcatgtaaaatgaactgatagtcactttcatggaggccaggtagaggactcctggtttattgagaaactgtcgggtgttttacattgtgagggcttcctggcatagtcagtactctaagagtttataggcccattggatgaaaacccccaggaagcagttcagtaacggtacccttgcctctcatctttggctcaaggacaaagttatgtgcccaacattatgccctcaatagaggaggcctgcaggttagcacatttccccttgagcctggtaggcatagcaggggagacacggcgacaagtctccctcccatagtcatgtaattctggaggaattaattcacctagttgagtcttggctttctcattgtaaccctaactcaggtggttactgtgagcattagatcattcaatcatgagaaggaggtgtacagatgataacatggtgcaattatatctccccttcagttcttgggaggggtgacattagtaaagagatgaaggtaagcctccagcagccgagtatgcactgttctcgccacccttcccaaaaagctccctgttatttacaggatttcaactatgcagcatgttattttgaattaagggttatggattcttgctttcagttgtctgggtattactttaaatcctctcatttggaataaacatgtcaagattactttaaaatatatcattcatcaaatcaagaacagaaatagtctttgtaaaaataataatgtttctatacttattacaatattatgattggttacttcaataaaaaaaatctcaaatggagccatgccgtttaaattggattgagtcaagaggaaaagcccataagggtgcctttgtcaaaatgaatgaaaacaaagggacacaaagcgtggcctgctgccctgatgcgcagagctgcacagtcctgggggaggcacagctgtatggcaggcctggcgacatggtgatttttgtgacatcattagttcctaagtactgtgggttgtaagtgtccgtggccatgtctggacaccaagccagcatcatggggctccccttccgttgatttctgcaagtcctgtatttgtaggccccaagggtccctggcaccaagcatttgtcctggagtgttacacatgatttctgcaaggcggggcagggaaagtacagtcaagtagcaatataatatatcatgttgacatttcttagatgcctactgcatgccaagccccgtcctaggaggttgctacatgttatcccacttaatcagtaatcccataatcacatgagactattattttcatgtagggggcgggggatgtttctcttccgcagaaggatgttaccttcaagggacaggtattacaaagatgttgaattaattttcaattatttgggcttcttaatcgtatctgggcttttggatctcatattttagttttaaaaccccatcagtttatagttaataacataagtttacaagtgtaataactcaaaaatttatttcatttagttgtataaaatatgattggcttattccacatgcaaccatttagttaaaaaaattgagacattacatttcattttaaagctcatctttgttactttctttgaacctgaaaatccttaatctgttactctaaaaaaatcttcactgagatatgactggcctcaccacactggtctatgtgaatttgctgacttttaaggacattatagtcagagccaaggtagacaagctatgaagtatgtgtgctctcacatttacatatttatacaactagaagagtatttgcaaagttttaatatttggatcactttaaaaactattagaacgtattagaaaaactattagaacatattagaaaatgattaaaacatattagaaaaactgttcacgtgtgggggggtggctcacgcctgtagtaatcccagcactttgggagcctgaggcgggtggatcacaaggtcaagagattgagaccatcctggctaacacagtgaaaccctgtctctactaaaaatacaaaaaaaatagctgggcgtagtggcgggcgcctgttgtcccagctactcgggaggctgaggcaggagaatggcctgaacctgggaggcggagcttgcagtgagccaagatcaagccactgcactccagcctgggcgagagcgagactcggtctcaaaaaaaagaaaaactattcacgtgcataaaatatactagaaactacatgttttctatcaatagactccattttttgctgcacctataccaaactgtctcttgcccctgtggtctgtgtgtgcatcttaatgcttactgttcacatttacttgttagtttctctttataaacactgtggtatcagaatatctactctttgagtatttgagggttctaattagagaacattcgctgagcatctactttgttcaagccattgtgctggttgctgtggagatatggaaataatagaacactgtctcactcaatatatttatcttaaatgtaaaaaagataatgttaacattgtgttggcaaggcttgtgaaagagggaagctgttccaattaaaataacaagaatagctaaaagaaaaacatttacaaattaaaaactaacttttgattagactttcgttaagaaagttcccttcagttaactatttatattattttacaatgctttttgcctaatggtacaagaaaaataggattcctttatttttaaaatacattttcagatatcttccagtctacaaagttaaagttgggaagttttgttaaaattaatatatgaagtctttgttcaagagtctctaaactgggtttctgggaaattaaatatacgtttgggctcactttttttttttttaaatcttaaccagggtttgtcttgaactcctaacctcaagtgatcctcccgctgagcccactttttaaaagggatgtagccatgcaaattctggaaactgtagaaataattaaaatagatataaatatatatttatattcactttccagaagtctttacaacatttgtggggataggttattaagtggttttctacagtgatgtcattgttcgatggcagaaattaagaggccacatcacaaaaacactgtccaggtctttgcttggcagaaactgagcagggaactgctttcaataacatcataaaagatagtgttttcctttatggagcagcaggagccgtggtgggatgatttagaaggtctttcatggaaataccagagagttagcagcgagctatgggaagacatagtcagaggccgtgaaacctggacccggtgtcacactgtagtcattagaagaggagtaaagtggaggacaataatggaacaggcagagctggggcaatttcagtggtgagggtcggtgtttgatttggaagtggagtctcatctgggatccaccactccctttatttgctaagagactttaagaaattaacagcctctctgagccttagtttcttcatatctaaaatgaaagtaatgatattcacctgacagcataattaagaagattaaattcaataaagcagacataccctccagcatattccttttgcagagcattttccacatccattttcttgactgatcctcaacctcctttggagtagtgttactattaggtcctggatctagctccatgttaaagatgagaaaactaaggcacaaagctgttacttgcctgagatcacagacctagtaagtggcagagcaaggacttagactgaaatcctgattctagtttctgtgcttgagaaaagtctgcttaatgcttccgagtgccaagtcacaccagccaggcccagctcccaggattgcacagagaaaaagaactcttaatgactacattatttgaccctttgataagggtaaacaaatatttcaataggtgtcacctgcaaaagaatcagtgaaagaggtgtatcagaaaaccttgcttagatgtcagcttttctccaacttgataaacatcccaacattaacttatcgccaccatagagtgtcagaataaatagtatacctgtgactttgaagatagggaaaccaaagcccagatggcaaatgtgaaaggacttgctttatcaaactggtggagtcccagaagttgcaaatcatccccttcatgaacggtttccaagaaaagcattctatacttaggaaatcatcctcttcaagaacagtttccaagaaaagcattctatacttaagaaattaaatctaaattaagaaaataaagaacactcacaactaaaagctatctttaaagaaaaaaaaaatggctattgttttcctgagacctcccacatgttgggaaataacttacagtgaggcagtttccttgtggtgtagtctgaactcttgaatagctggctgtgtatggattgcggcagtcaccataacaatgggctcatcttaaaacgttcatttagattcattattggaactgtgagcagtgagaaaggaatggtctctcaggaccgtaaggggtttgcttacagctcttcttagttgctccagcctagctatttgtaactcaaacagctaagacacatgccacaattttaagaaacaggataactcaccaggaggaatgtgcttaaagtcttataaaaagaataacaaaagcaagataaatctggaaaagtataagtagtaaacagaattggttgtctggagtttagtcactaagcaaaaatataataagatgcttgaagtaaagtttgaaaatgagggaggaatctctttaaaaggataactaccaggtgaacattggaagcctggcctccgttccagaccataagatcctttttttgtctttcaacttggagccaacactaaattcatgtccagtgcacttgtattcactaatggaatgtcctgtttcttggtggaagtttacacactgggctttagaaacatgtagaggcatttgtagattcccgctaactgaataggtggcaagtgttttaggcaaaggtgagtttgttggaaattcacttctagggtatttgtattaatgggtagaattatttggattgaatttgccaataaaaagacaaagtaactgaatgaattttttctttttttttttcttttttttttttcagacagagagtattgctctgtcacccaggctggagtgcaatggcacaatctcggctcactaaaacctccacctcccatgtccaagcagttcttctgcctgtatcctgtatctgggattacaggcatatgccaccctacctggctaatttttgtatttttagtagagatgaggtttcaccatgttggtcacgctggtcttgaactcctgacctcaggtgatccacccatctcagcctcccaaagtgctgagattacaggcatgagccaccatgcccagccatgaatttttttttaagacccaacagtatgctgcctacaagagtcacctcacttttaaggacacccatagactgaaagtgaaaagttggaaaaagatactccatgcaaatagaaaccaaaagaaagcagggatagctaaacttatatcagacaaaatagactttaagtcaaaaactgtaaaaagagacattatataatgataagagcatcaattcatcaagaggatataacagttatatatgcacccaacattgaaacacctaaatacataaaatattgaaggatctgaagggagggataaattgcaatacaataatagtaggagactttaatactctacagataatccagacagaaaattaataaacattgggcttgaacaatactgtagaccaaatggacctaactgacgtttcatccaacagcaactgtatacacatccttctcaagcatacatggaacattctccaggatagatcaaatgttaaggcacaacacaagcctcagcaaattttagaagcctgaaattatatcaagtatcttttcagaccacagtgttaagaaactagaaatcaatgccagaaggaattttggaaaattcacgaatacatggaaataaaaaacatacttctgaacaacaaatgggtcagtgaagaaattaaatggaaattaaaaaatattttgaggcaaatggaaacacaacttattaaaatgtatgggatacggccaggcacagtggctcacacctgtaatcccagcactttgggaggctgaggtgagcagatcatgaggtcaagagatggagaccatcctggctaatagggtaaaaccccttctctactaaaaatacaaaaaattagctgggtgtggtgacgggtgcctgtagtcccaggtactcgggaggctgaggcaggagaatggtgtgaacccaggaggcggagcttgcagtgagccaagatcatgccactgcagtctagcctgggtgacagagtgagactccttctaaaaaaaaaaaaaaaaaaaaaaaaaaaaaatggatacagcacaagtagttctaaaagcaaagtttaaagcaataaacacctacatcaaaaagcaagagagatcccaacgtaacattatacctcacggaactggggggagggagaaactaagcccaaagttagcagaaggaaggaaacaagatgaaaacagaaataattgaaggagactagaaaaacagtacaaagatcaacaaaactaagagttgtttttctgaaaagataaaaatcaacaaatctttagttacaccaagaagacacaaaatcagaaaaaaagattacagcaaataccccagaaatacacaggaacatttgagactattaggaacaaatatatgccaacaaattggataacctagaagaaatgtataaatttctagatacatgcaacttatcaagactgaagaaatagaaaatccaacagaccaatgggtaaggagatgaaatcaataagttttccatcaaagaaaaccctagggcctgatggcttcatggctgaactctaccaaatatttaaagaactaataccaatccttctcagattctttcaaaaaggtaaatgaggagggaatacttccaaactcttttttgcaaggccagcatcatcctcatatcaaaggcaggcaaggccattacaaataataataataataaattacaggccaatatcctttatgaacatagatgtaaaaatccccagtataatgctagcaaacccaattcaacaacacattaaaggatcatccaccatgatcaagtaggatttatccctgggacgcaaggatgattcagcatacccaaatcgacaaatgtgatacatcattaacagaatgaaggccaaaaaccatataattatctcattagatgcaaagaaagtgtttgacaaaattgacaagtttattgctgggttatttttcagttctaaatagcaataataataatagctaactcctactgtgcactaacttcatgccaggtgtgttttaagcacttcacaggtattaactcagtactactcagatagagttccgttaattttattttcttttttaattatcagccaaatcgcttattgatttggtttcatttctgctatttttttctttgtctgtccattgactctaagccataaatttttatgcaattttaatctgattatcatttcctcttaagttttttgaggattggtttcattttgctagaagaaccttgtgagaccttcttcctccattccccttcaaagactcttgttagtttcagtcaaccaaaatgtgataatgtctaagtaaactggtcattttcaagtttctgtaacagtaagcctcttgatgattatgttaatgttaacaaataggaagaaaacatcccagattcttaatagaagaaatcaggtttgtcatacagagatgaaaactcaagacagaccaccaaattatttaaatgttagtttgtgataaagtgggctacatccaaaaaaaattcctcaagaaaacaagtaggcatgccacaaaactgggagaaaatattctcaacacatatatctggctaaggacttagatccagatcacataacaaggccctgcaaattaataaaagtcaagcgaattgcaaattaaagataggcaaaagacttgtacatattattcacagaagaaggtacatgaacaaccagtaagcacgtgaaaagatgcgcagcatctttcagcatcacagaaatgcagtcgtggtaccattcgcaccctctaggatagctaaaatagaaaagactgacgatcaatgttgaagaggatgtggtgcaactcagactctcgtgcgcaaagggatccaatctcttgagaaaactgtttcttgtgaagttaactacagaactactctgtgacccagcacttccttgtatttacccagaaaaataacttaagttctcaaaatttgaacaaaaacattcataacattcttattaatagcatttttattatacgaaacctccaaactggaaataacccgaatgtccatcgaaaagaaaatggaggaattaaggtatagttataaggaactactaccgaatagctcgataacatgagtgaatctcataggcacaagggagtgtgttctgcatgattccatttatatgaactcctagtataagcaaaattaattacagaattagaagtcattatagtgtctacctcttggggtggaggtgggatatcttgaggggatgcgtttgtaatgtatccagttgtcaaaaaatcatcctgctggaaaatttacattttgtttgctcagtttttaattgtttccattttagaatgttaactttgttcttgggaccaaaaacatagacctatttgtattatgacatcttctgatttatagtctaaatcaggggtccccaacccccaggccgggtaccagtactggtgagtggcctattaggaaccaggccgcacagcaggaagtgattgacaagcaggaacgttactgcctgagctctgcctcctgtcagatcagtaaggcattagattcccacagaagcatgaagcgtattgtgaactgtgtatacgagggatctaggttgtgcactcctcatgcggatctaacacctgatgacctgaggtggaacaatttcactttgaaactacccctgtccgtggaaaacttgtcctccacaaaaccagtccctggtgcccaaaaggttggggaccgctgacctaaattattaaaatttagtgagatgcatccttactacttaaaatgtcagctgcatttctagtcagtgccttatctccttctgtcaaagttcgagtcactggattttatattgtttcattcaaagtgtgttggaataccctttttatggttggaatacagattgagagaagtacatttttatatcatctttgttataagagtgaatgtgaatataaaccaagagtgaatggagtgaatctaaaccaagattcttctagagacaacagtgttgctataaattaattaactaggactcttcttttcctgaaggtgtacaagggagaagaagccacattccaaatctcaggcctccagaccaacacagactacaggttccgcgtatgtgcgtgtcgtcgctgtttagacacctctcaggagctaagcggagccttcagcccctctgcggcttttgtattacaacgaagtgaggtcatgcttacaggggacatggggagcttagatgatcccaaaatgaagagcatgatgcctactgatgaacagtttgcagccatcattgtgcttggctttgcaactttgtccattttatttgcctttatattacagtacttcttaatgaagtaaacccaacaaaactagaggtatgaattaatgctacacattttaatacacacatttattcagatactcccctttttaaagcccttttgttttttgatttatatactctgttttacagatttagctagaaaaaaaatgtcagtgttttggtgcacctttttgaaatgcaaaactaggaaaaggttaaactggatttttttttttaaaaaaaagaaaaaaaaagaagaaaagtataccagataccaaaagctagctttcttatgttttcctttaaattttcagatttaccttcattctgttttcactgatgtcttttgcaagcctttgatttttttttttttgttacagtttagtaatttatattcaccagtcacttcatatgtcttgaacatctgtatctgtaaacatgaatcaccgtgtgtgtacttacagggctaggatttcagtgttgtcagagtattaccacacagcaacagcaacatacagaagatatgttcactcagataagactgccctaaacaaccattttgtcactcagttatttaactgtgtttagctcatttaaatcaaaatgtgtactttaatctaaaatgttttaataatctgtatttcttataattttaacactatgagctgcctgtataagaaatcaagtaaccagaatgcacctataaattatggagcattgtagattttaccacatcaattcatagcagtaactttaagagggcattgtgcaatagttagttgttttcttgttcagctattttaaaggctgctttaacttgtttgtttgtctttgtatataactacttctaatctaatcactagagttattatattctgttatgtttgaccagaattatatgacaagaactggtgacagtttagtgcctctgcccattgtccatgatttacactaattgtgagcagtcttcttatgtgtcagctcattatttttgaaacatttgcctttaggctgttctttgaggtatcaatgaagtgattgaatttcaataccttaattcagtgcacataatactaatgtaacagcagatgaaaattgataaaacccaaaagagagtcatctaaatttgtagttcctatttctgtgggtttgcctggccatggttggagagggaatggtgtttgatggtaaacacagggtgtttggggatcaaggagcctagattctctccctggatctgtcactaacttgctgcgtgacctgaacacgtcactttacctctctgtgcctcagttttcccatgcatgaaaaataaaataaaataaaacggggattctaatgtttgtaagtgctttgagatctttgaccaacaggtgctattggagtgcaaagtgttactcttacgtgtttattttgagtcatgagataatcaattttaacccaaagtcattggattatttatatgaagtccataatgttcgagtacctcagggacatttaagagttggaggtgcaaatatattccaaaagggtgcaacagacacagtgtatccccctgcttctgtttttgtatatttttgctacttggtttttcttgatcatagctattttgtgcttgatctttattgtctaagatgcagtatcctgtactagcttataatattcccataccaaagtcatggggaaacaaacattattttgtttttggtttatttatactatattctgcatacagtactttaaatgccaattacagtgcaatctttatttattgtaaaattttttaagtgtacttatgtactaattttcccttgtagcatgttatatttttgtgttttatacttttgtaattttaggtcagtcttgttccttggcaacatctgtagtattattaatcttctgacattttcttatgtttttaaaaagataagagcatctagtgcattaaatgccaaaaaaaaaatacattatcagtgattgaaacgtttacatgtacccaaaaaccataatcatctcttggaagaaaatgctgagatcaatgaattattctgtgtgcctatattgacgtagtgagtactagagagttctgtattttattattgactataataattagtttaattagctttgcaaactgatggcatcaaggtaaatatatttttgccaaagttctggccttccaaaactcacccccttatttaaatgtgtgctatgacccactatgaccacagcatctgcattttctaaaaaattccatgcaggtgttttggggagaggtattttttaagcaatgaaaattcaactgagtacaaagccccctcttggggggttggggaagtctcttttttgaaacacttcagaactgctgctataaagaaattctctaattggttgaattttttttttaagtaaatagtactttaggccaaaatttatatgaatatttgatcttcttgagattttcatactatcatttaaccaccaggaagctgaagtgtgtgaagtacaaagctgacagcactttattttattgctctccattatttggtattcattatattccttcagtcagaaaattattactctctatggcactgttttttatcacaaatatgtatatgtgatattgatatataactatatatattgccatcacacacgaacaataaaataaagtgttctattaacctgatctctttgcccttttgctatgtgaggagtgaatgagtggccttctgatgctctgactcttctctgtatgtcaaactcatccctggcacaagaaattccagtcatgtgaagcaaactgccctttgtcctcaaagaaattgttgaaaaagaaaactttttaaagagattttttgcatattctctgccttgttcttatcaacttgaaatgttggcattttctaaccttgttttgttggctacaataattcagtattcatgtcaaaattgagaagtgccctaattgaatgtgtttgaatgttatccttgcacaattctttaaattgaaagataaaatgttttacctcactgttggacatacattccaagcttttcaactctaggagaaaaagaaaatcatgttttcctgtattgtaaattttagactatttcatatacattgtattaaaactgccatatcaattttaatgtatagattttgcaaatattatgctatatgtaatacctaactgtatctgtagtgtatatgtaatatatttatgcccaataaatgttttaattctttctgacttaaatagggtttttctgccatgactaggattgcttttgttgttgttgttgttgtttctttctttttttttttttttgagacggagtcttgctctgtcgccaggctggagtgcagtggcgcgatctcagctcactgcaacctccagctcccaggttcaagtgattcccctgcctcagcctcccaagtagctggggattacaggcactcgccaccatgcccggataattttttttttttttttgagttggagtcttgctctgtcgcccaggctggagtgcagtgacccaatctcggctcactgcaagctccacctcccgggttcatgccattctcctgcctcagcctcccaagtagctgggactacaggtgcccgccaccacgcccggctaatttttttaattttagtagagtcggggtttcaccatgttggccaagatggtctcgatctgacctcgtgatctgcccgcctcggcctcccaaagtgctgggattacaggtgtgagcccccgcacccagccttattcttcccttttaaatacttaaagcacattcagattagttgaaaattcacgtgtttttggaggccaggcaggtggccttctgcagagacagcagcagctcagctcttgctgaccaaggccttggaggactgtgagccacaatcacatatgtccatgtttcaaaagaagctaaatatccagatttcctccatgggccaactaaaaggtgattgtggactatacaggctgccagtttaatcctttatcagagtctctgtggataatgtaccttgttgcctaatactttatctgtctaccaaaactcagtccagatctccctctgttcacctggcacactgggtgcttcctctcccctgacgaactctatagagtgttcatgtcctttcctgcaggtctcattcaacaacaacaacaacaacagcaataaaacacagtgttcctgcta

SEQ ID NO: 2 - DNA, 7904 bp, homo sapiens
aagctcgggcgggggagcggggcgcggcgggaaggagcgggcgacccggtgtgtgggccagcggagctccggaagccagttgagggaagttctccatgaatgtacgtcacaatgatgatgaccgaccaaatccctctggaactgccaccattgctgaacggagaggtagccatgatgccccacttggtgaatggagatgcagctcagcaggttattctcgttcaagttaatccaggtgagactttcacaataagagcagaggatggaacacttcagtgcattcaaggacctgctgaagttcccatgatgtcacccaatggatccattcctcccattcatgtgcctccaggttatatctcacaggtgattgaagatagtactggagtccgccgggtggtggtcacaccccagtctcctgagtgttatcccccaagctacccctcagccatgtctccaacccatcatctccctccctatctgactcaccatccacattttattcataactcacacacggcttactacccacctgttaccggacctggagatatgccgcctcagttttttccccagcatcatcttccccacacaatatatggtgagcaagaaattataccattttatggaatgtcaacctacatcacccgagaagaccagtacagcaagcctccgcacaaaaaactgaaagaccgccagatcgatcgccagaaccgcctcaacagccctccttcttctatctacaaaagcagctgcacaacagtatacaatggctatgggaagggccatagtggtggaagtggcggaggcggcagcggtagtggtcccggaattaagaaaacagagcgacgagcaagaagcagcccaaagtcgaatgattcagacttgcaagaatatgagttggaagtaaagagggtgcaagacattctttcgggaatagagaaaccacaggtttctaatattcaggcaagagcagttgtgttgtcctgggctccccctgttggactttcctgtggaccccacagtggtctttccttcccctacagttacgaggtggccttatcagacaaaggacgagatggaaaatacaagataatttacagtggagaagaattagaatgtaacctgaaagatcttagaccagcaacagattatcatgtgagggtgtatgccatgtacaattccgtaaagggatcctgctccgagcctgttagcttcaccacccacagctgtgcacccgagtgtcctttcccccctaagctggcacataggagcaaaagttcactaaccctgcagtggaaggcaccaattgacaacggttcaaaaatcaccaactaccttttagagtgggatgagggaaaaagaaatagtggtttcagacagtgcttcttcgggagccagaagcactgcaagttgacaaagctttgtccggcaatggggtacacattcaggctggccgctcgaaacgacattggtaccagtggttatagccaagaggtggtgtgctacacattaggaaatatccctcagatgccttctgcaccaaggctggttcgagctggcatcacatgggtcacgttgcagtggagtaagccagaaggctgttcacccgaggaagtgatcacctacaccttggaaattcaggaggatgaaaatgataaccttttccacccaaaatacactggagaggatttaacctgtactgtgaaaaatctcaaaagaagcacacagtataaattcaggctgactgcttctaatacggaaggaaaaagctgtccaagcgaagttcttgtttgtacgacgagtcctgacaggcctggacctcctaccagaccgcttgtcaaaggcccagttacatctcatggctttagtgtcaaatgggatccccctaaggacaatggtggttcagaaatcctcaagtacttgctagagattactgatggaaattctgaagcgaatcagtgggaagtggcctacagtgggtcggctaccgaatacaccttcacccacttgaaaccaggcactttgtacaaactccgagcatgctgcatcagtaccggcggacacagccagtgttctgaaagtctccctgttcgcacactaagcattgcaccaggtcaatgtcgaccaccgagggttttgggtagaccaaagcacaaagaagtccacttagagtgggatgttcctgcatcggaaagtggctgtgaggtctcagagtacagcgtggagatgacggagcccgaagacgtagcctcggaagtgtaccatggcccagagctggagtgcaccgtcggcaacctgcttcctggaaccgtgtatcgcttccgggtgagggctctgaatgatggagggtatggtccctattctgatgtctcagaaattaccactgctgcagggcctcctggacaatgcaaagcaccttgtatttcttgtacacctgatggatgtgtcttagtgggttgggagagtcctgatagttctggtgctgacatctcagagtacaggttggaatggggagaagatgaagaatccttagaactcatttatcatgggacagacacccgttttgaaataagagacctgttgcctgctgcacagtattgctgtagactacaggccttcaatcaagcaggggcagggccgtacagtgaacttgtcctttgccagacgccagcgtctgcccctgaccccgtctccactctctgtgtcctggaggaggagccccttgatgcctaccctgattcaccttctgcgtgccttgtactgaactgggaagagccgtgcaataacggatctgaaatccttgcttacaccattgatctaggagacactagcattaccgtgggcaacaccaccatgcatgttatgaaagatctccttccagaaaccacctaccggatcagaattcaggctataaatgaaattggagctggaccatttagtcagttcattaaagcaaaaactcggccattaccacccttgcctcctaggctagaatgtgctgctgctggtcctcagagcctgaagctaaaatggggagacagtaactccaagacacatgctgctgaggacattgtgtacacactacagctggaggacagaaacaagaggtttatttcaatctacagaggacccagccacacctacaaggtccagagactgacggaattcacatgctactccttcagaatccaggcagcaagcgaggctggagaagggcccttctcagaaacctataccttcagcacaaccaaaagtgtcccccccaccatcaaagcacctcgagtaacacagttagaaggaaattcatgtgaaattttatgggagacggtaccatcaatgaaaggtgaccctgttaactacattctgcaggtattggttggaagagaatctgagtacaaacaggtgtacaagggagaagaagccacattccaaatctcaggcctccagaccaacacagactacaggttccgcgtatgtgcgtgtcgtcgctgtttagacacctctcaggagctaagcggagccttcagcccctctgcggcttttgtattacaacgaagtgaggtcatgcttacaggggacatggggagcttagatgatcccaaaatgaagagcatgatgcctactgatgaacagtttgcagccatcattgtgcttggctttgcaactttgtccattttatttgcctttatattacagtacttcttaatgaagtaaacccaacaaaactagaggtatgaattaatgctacacattttaatacacacatttattcagatactcccctttttaaagcccttttgttttttgatttatatactctgttttacagatttagctagaaaaaaaatgtcagtgttttggtgcacctttttgaaatgcaaaactaggaaaaggttaaactggatttttttttttaaaaaaaagaaaaaaaaagaagaaaagtataccagataccaaaagctagctttcttatgttttcctttaaattttcagatttaccttcattctgttttcactgatgtcttttgcaagcctttgatttttttttttttgttacagtttagtaatttatattcaccagtcacttcatatgtcttgaacatctgtatctgtaaacatgaatcaccgtgtgtgtacttacagggctaggatttcagtgttgtcagagtattaccacacagcaacagcaacatacagaagatatgttcactcagataagactgccctaaacaaccattttgtcactcagttatttaactgtgtttagctcatttaaatcaaaatgtgtactttaatctaaaatgttttaataatctgtatttcttataattttaacactatgagctgcctgtataagaaatcaagtaaccagaatgcacctataaattatggagcattgtagattttaccacatcaattcatagcagtaactttaagagggcattgtgcaatagttagttgttttcttgttcagctattttaaaggctgctttaacttgtttgtttgtctttgtatataactacttctaatctaatcactagagttattatattctgttatgtttgaccagaattatatgacaagaactggtgacagtttagtgcctctgcccattgtccatgatttacactaattgtgagcagtcttcttatgtgtcagctcattatttttgaaacatttgcctttaggctgttctttgaggtatcaatgaagtgattgaatttcaataccttaattcagtgcacataatactaatgtaacagcagatgaaaattgataaaacccaaaagagagtcatctaaatttgtagttcctatttctgtgggtttgcctggccatggttggagagggaatggtgtttgatggtaaacacagggtgtttggggatcaaggagcctagattctctccctggatctgtcactaacttgctgcgtgacctgaacacgtcactttacctctctgtgcctcagttttcccatgcatgaaaaataaaataaaataaaacggggattctaatgtttgtaagtgctttgagatctttgaccaacaggtgctattggagtgcaaagtgttactcttacgtgtttattttgagtcatgagataatcaattttaacccaaagtcattggattatttatatgaagtccataatgttcgagtacctcagggacatttaagagttggaggtgcaaatatattccaaaagggtgcaacagacacagtgtatccccctgcttctgtttttgtatatttttgctacttggtttttcttgatcatagctattttgtgcttgatctttattgtctaagatgcagtatcctgtactagcttataatattcccataccaaagtcatggggaaacaaacattattttgtttttggtttatttatactatattctgcatacagtactttaaatgccaattacagtgcaatctttatttattgtaaaattttttaagtgtacttatgtactaattttcccttgtagcatgttatatttttgtgttttatacttttgtaattttaggtcagtcttgttccttggcaacatctgtagtattattaatcttctgacattttcttatgtttttaaaaagataagagcatctagtgcattaaatgccaaaaaaaaaatacattatcagtgattgaaacgtttacatgtacccaaaaaccataatcatctcttggaagaaaatgctgagatcaatgaattattctgtgtgcctatattgacgtagtgagtactagagagttctgtattttattattgactataataattagtttaattagctttgcaaactgatggcatcaaggtaaatatatttttgccaaagttctggccttccaaaactcacccccttatttaaatgtgtgctatgacccactatgaccacagcatctgcattttctaaaaaattccatgcaggtgttttggggagaggtattttttaagcaatgaaaattcaactgagtacaaagccccctcttggggggttggggaagtctcttttttgaaacacttcagaactgctgctataaagaaattctctaattggttgaattttttttttaagtaaatagtactttaggccaaaatttatatgaatatttgatcttcttgagattttcatactatcatttaaccaccaggaagctgaagtgtgtgaagtacaaagctgacagcactttattttattgctctccattatttggtattcattatattccttcagtcagaaaattattactctctatggcactgttttttatcacaaatatgtatatgtgatattgatatataactatatatattgccatcacacacgaacaataaaataaagtgttctattaacctgatctctttgcccttttgctatgtgaggagtgaatgagtggccttctgatgctctgactcttctctgtatgtcaaactcatccctggcacaagaaattccagtcatgtgaagcaaactgccctttgtcctcaaagaaattgttgaaaaagaaaactttttaaagagattttttgcatattctctgccttgttcttatcaacttgaaatgttggcattttctaaccttgttttgttggctacaataattcagtattcatgtcaaaattgagaagtgccctaattgaatgtgtttgaatgttatccttgcacaattctttaaattgaaagataaaatgttttacctcactgttggacatacattccaagcttttcaactctaggagaaaaagaaaatcatgttttcctgtattgtaaattttagactatttcatatacattgtattaaaactgccatatcaattttaatgtatagattttgcaaatattatgctatatgtaatacctaactgtatctgtagtgtatatgtaatatatttatgcccaataaatgttttaattctttctgacttaaatagggtttttctgccatgactaggattgcttttgttgttgttgttgttgtttctttctttttttttttttttgagacggagtcttgctctgtcgccaggctggagtgcagtggcgcgatctcagctcactgcaacctccagctcccaggttcaagtgattcccctgcctcagcctcccaagtagctggggattacaggcactcgccaccatgcccggataattttttttttttttttgagttggagtcttgctctgtcgcccaggctggagtgcagtgacccaatctcggctcactgcaagctccacctcccgggttcatgccattctcctgcctcagcctcccaagtagctgggactacaggtgcccgccaccacgcccggctaatttttttaattttagtagagtcggggtttcaccatgttggccaagatggtctcgatctgacctcgtgatctgcccgcctcggcctcccaaagtgctgggattacaggtgtgagcccccgcacccagccttattcttcccttttaaatacttaaagcacattcagattagttgaaaattcacgtgtttttggaggccaggcaggtggccttctgcagagacagcagcagctcagctcttgctgaccaaggccttggaggactgtgagccacaatcacatatgtccatgtttcaaaagaagctaaatatccagatttcctccatgggccaactaaaaggtgattgtggactatacaggctgccagtttaatcctttatcagagtctctgtggataatgtaccttgttgcctaatactttatctgtctaccaaaactcagtccagatctccctctgttcacctggcacactgggtgcttcctctcccctgacgaactctatagagtgttcatgtcctttcctgcaggtctcattcaacaacaacaacaacaacagcaataaaacacagtgttcctgcta

SEQ ID NO: 3 - DNA, 408 bp, homo sapiens
agctcgggcgggggagcggggcgcggcgggaaggagcgggcgacccggtgtgtgggccagcggagctccggaagccagttgagggaagttctccatgaatgtacgtcacaatgatgatgaccgaccaaatccctctggaactgccaccattgctgaacggagaggtagccatgatgccccacttggtgaatggagatgcagctcagcaggttattctcgttcaagttaatccaggtgagactttcacaataagagcagaggatggaacacttcagtgcattcaagatgaagtggtgaagagagcctgcgattgaagattttttcatctcagctttttcccccttaccttgttctctctcatgtttcatgatctgtgtcatagatatttcttcattacgagcacttcgc

SEQ ID NO: 4 - DNA, 678 bp, homo sapiens
agcagacactggaatgtgaatgcattgggaggtgagcccttaaggagagcccaaatgtttaccaaagagaaaatctggtcagaggttattctcgttcaagttaatccaggtgagactttcacaataagagcagaggatggaacacttcagtgcattcaaggacctgctgaagttcccatgatgtcacccaatggatccattcctcccattcatgtgcctccaggttatatctcacaggtgattgaagatagtactggagtccgccgggtggtggtcacaccccagtctcctgagtgttatcccccaagctacccctcagccatgtctccaacccatcatctccctccctatctgactcaccatccacattttattcataactcacacacggcttactacccacctgttaccggacctggagatatgccgcctcagttttttccccagcatcatcttccccacacaatatatggtgagcaagaaattataccattttatggaatgtcaacctacatcacccgagaagaccagtacagcaagcctccgcacaaaaaactgaaagaccgccagatcgatcgccagaaccgcctcaacagccctccttcttctatctacaaaagcagctgcacaacagtatacaatggctatgggaagggccatagtggtggaagtggcgga

SEQ ID NO: 5 - DNA, 3684 bp, homo sapiens
agtgtctaccaccaaactcctaaggctggatggtggaagccagttgagggaagttctccatgaatgtacgtcacaatgatgatgaccgaccaaatccctctggaactgccaccattgctgaacggagaggtagccatgatgccccacttggtgaatggagatgcagctcagcaggttattctcgttcaagttaatccaggtgagactttcacaataagagcagaggatggaacacttcagtgcattcaaggacctgctgaagttcccatgatgtcacccaatggatccattcctcccattcatgtgcctccaggttatatctcacaggtgattgaagatagtactggagtccgccgggtggtggtcacaccccagtctcctgagtgttatcccccaagctacccctcagccatgtctccaacccatcatctccctccctatctgactcaccatccacattttattcataactcacacacggcttactacccacctgttaccggacctggagatatgccgcctcagttttttccccagcatcatcttccccacacaatatatggtgagcaagaaattataccattttatggaatgtcaacctacatcacccgagaagaccagtacagcaagcctccgcacaaaaaactgaaagaccgccagatcgatcgccagaaccgcctcaacagccctccttcttctatctacaaaagcagctgcacaacagtatacaatggctatgggaagggccatagtggtggaagtggcggaggcggcagcggtagtggtcccggaattaagaaaacagagcgacgagcaagaagcagcccaaagtcgaatgattcagacttgcaagaatatgagttggaagtaaagagggtgcaagacattctttcgggaatagagaaaccacaggtttctaatattcaggcaagagcagttgtgttgtcctgggctccccctgttggactttcctgtggaccccacagtggtctttccttcccctacagttacgaggtggccttatcagacaaaggacgagatggaaaatacaagataatttacagtggagaagaattagaatgtaacctgaaagatcttagaccagcaacagattatcatgtgagggtgtatgccatgtacaattccgtaaagggatcctgctccgagcctgttagcttcaccacccacagctgtgcacccgagtgtcctttcccccctaagctggcacataggagcaaaagttcactaaccctgcagtggaaggcaccaattgacaacggttcaaaaatcaccaactaccttttagagtgggatgagggaaaaagaaatagtggtttcagacagtgcttcttcgggagccagaagcactgcaagttgacaaagctttgtccggcaatggggtacacattcaggctggccgctcgaaacgacattggtaccagtggttatagccaagaggtggtgtgctacacattaggaaatatccctcagatgccttctgcaccaaggctggttcgagctggcatcacatgggtcacgttgcagtggagtaagccagaaggctgttcacccgaggaagtgatcacctacaccttggaaattcaggaggatgaaaatgataaccttttccacccaaaatacactggagaggatttaacctgtactgtgaaaaatctcaaaagaagcacacagtataaattcaggctgactgcttctaatacggaaggaaaaagctgtccaagcgaagttcttgtttgtacgacgagtcctgacaggcctggacctcctaccagaccgcttgtcaaaggcccagttacatctcatggctttagtgtcaaatgggatccccctaaggacaatggtggttcagaaatcctcaagtacttgctagagattactgatggaaattctgaagcgaatcagtgggaagtggcctacagtgggtcggctaccgaatacaccttcacccacttgaaaccaggcactttgtacaaactccgagcatgctgcatcagtaccggcggacacagccagtgttctgaaagtctccctgttcgcacactaagcattgcaccaggtcaatgtcgaccaccgagggttttgggtagaccaaagcacaaagaagtccacttagagtgggatgttcctgcatcggaaagtggctgtgaggtctcagagtacagcgtggagatgacggagcccgaagacgtagcctcggaagtgtaccatggcccagagctggagtgcaccgtcggcaacctgcttcctggaaccgtgtatcgcttccgggtgagggctctgaatgatggagggtatggtccctattctgatgtctcagaaattaccactgctgcagggcctcctggacaatgcaaagcaccttgtatttcttgtacacctgatggatgtgtcttagtgggttgggagagtcctgatagttctggtgctgacatctcagagtacaggttggaatggggagaagatgaagaatccttagaactcatttatcatgggacagacacccgttttgaaataagagacctgttgcctgctgcacagtattgctgtagactacaggccttcaatcaagcaggggcagggccgtacagtgaacttgtcctttgccagacgccagcgtctgcccctgaccccgtctccactctctgtgtcctggaggaggagccccttgatgcctaccctgattcaccttctgcgtgccttgtactgaactgggaagagccgtgcaataacggatctgaaatccttgcttacaccattgatctaggagacactagcattaccgtgggcaacaccaccatgcatgttatgaaagatctccttccagaaaccacctaccggatcagaattcaggctataaatgaaattggagctggaccatttagtcagttcattaaagcaaaaactcggccattaccacccttgcctcctaggctagaatgtgctgctgctggtcctcagagcctgaagctaaaatggggagacagtaactccaagacacatgctgctgaggacattgtgtacacactacagctggaggacagaaacaagaggtttatttcaatctacagaggacccagccacacctacaaggtccagagactgacggaattcacatgctactccttcagaatccaggcagcaagcgaggctggagaagggcccttctcagaaacctataccttcagcacaaccaaaagtgtcccccccaccatcaaagcacctcgagtaacacagttagaaggaaattcatgtgaaattttatgggagacggtaccatcaatgaaaggtgaccctgttaactacattctgcaggtattggttggaagagaatctgagtacaaacaggtgtacaagggagaagaagccacattccaaatctcaggcctccagaccaacacagactacaggttccgcgtatgtgcgtgtcgtcgctgtttagacacctctcaggagctaagcggagccttcagcccctctgcggcttttgtattacaacgaagtgaggtcatgcttacaggggacatggggagcttagatgatcccaaaatgaagagcatgatgcctactgatgaacagtttgcagccatcattgtgcttggctttgcaactttgtccattttatttgcctttatattacagtacttcttaatgaagtaaacccaa

SEQ ID NO: 6 - DNA, 5083 bp, homo sapiens
gcggcggcggcggctggaggaggagagcggcggcggcgggagcagcgaagggggcggcagggatcctccaggctgccggctgggaaggcgtgggcgacccggtgtgtggcgcgcccagagccccgcgtttcagccctagggaaggaagccagttgagggaagttctccatgaatgtacgtcacaatgatgatgaccgaccaaatccctctggaactgccaccattgctgaacggagaggtagccatgatgccccacttggtgaatggagatgcagctcagcaggttattctcgttcaagttaatccaggtgagactttcacaataagagcagaggatggaacacttcagtgcattcaaggacctgctgaagttcccatgatgtcacccaatggatccattcctcccattcatgtgcctccaggttatatctcacaggtgattgaagatagtactggagtccgccgggtggtggtcacaccccagtctcctgagtgttatcccccaagctacccctcagccatgtctccaacccatcatctccctccctatctgactcaccatccacattttattcataactcacacacggcttactacccacctgttaccggacctggagatatgccgcctcagttttttccccagcatcatcttccccacacaatatatggtgagcaagaaattataccattttatggaatgtcaacctacatcacccgagaagaccagtacagcaagcctccgcacaaaaaactgaaagaccgccagatcgatcgccagaaccgcctcaacagccctccttcttctatctacaaaagcagctgcacaacagtatacaatggctatgggaagggccatagtggtggaagtggcggaggcggcagcggtagtggtcccggaattaagaaaacagagcgacgagcaagaagcagcccaaagtcgaatgattcagacttgcaagaatatgagttggaagtaaagagggtgcaagacattctttcgggaatagagaaaccacaggtttctaatattcaggcaagagcagttgtgttgtcctgggctccccctgttggactttcctgtggaccccacagtggtctttccttcccctacagttacgaggtggccttatcagacaaaggacgagatggaaaatacaagataatttacagtggagaagaattagaatgtaacctgaaagatcttagaccagcaacagattatcatgtgagggtgtatgccatgtacaattccgtaaagggatcctgctccgagcctgttagcttcaccacccacagctgtgcacccgagtgtcctttcccccctaagctggcacataggagcaaaagttcactaaccctgcagtggaaggcaccaattgacaacggttcaaaaatcaccaactaccttttagagtgggatgagggaaaaagaaatagtggtttcagacagtgcttcttcgggagccagaagcactgcaagttgacaaagctttgtccggcaatggggtacacattcaggctggccgctcgaaacgacattggtaccagtggttatagccaagaggtggtgtgctacacattaggaaatatccctcagatgccttctgcaccaaggctggttcgagctggcatcacatgggtcacgttgcagtggagtaagccagaaggctgttcacccgaggaagtgatcacctacaccttggaaattcaggaggatgaaaatgataaccttttccacccaaaatacactggagaggatttaacctgtactgtgaaaaatctcaaaagaagcacacagtataaattcaggctgactgcttctaatacggaaggaaaaagctgtccaagcgaagttcttgtttgtacgacgagtcctgacaggcctggacctcctaccagaccgcttgtcaaaggcccagttacatctcatggctttagtgtcaaatgggatccccctaaggacaatggtggttcagaaatcctcaagtacttgctagagattactgatggaaattctgaagcgaatcagtgggaagtggcctacagtgggtcggctaccgaatacaccttcacccacttgaaaccaggcactttgtacaaactccgagcatgctgcatcagtaccggcggacacagccagtgttctgaaagtctccctgttcgcacactaagcattgcaccaggtcaatgtcgaccaccgagggttttgggtagaccaaagcacaaagaagtccacttagagtgggatgttcctgcatcggaaagtggctgtgaggtctcagagtacagcgtggagatgacggagcccgaagacgtagcctcggaagtgtaccatggcccagagctggagtgcaccgtcggcaacctgcttcctggaaccgtgtatcgcttccgggtgagggctctgaatgatggagggtatggtccctattctgatgtctcagaaattaccactgctgcagggcctcctggacaatgcaaagcaccttgtatttcttgtacacctgatggatgtgtcttagtgggttgggagagtcctgatagttctggtgctgacatctcagagtacaggttggaatggggagaagatgaagaatccttagaactcatttatcatgggacagacacccgttttgaaataagagacctgttgcctgctgcacagtattgctgtagactacaggccttcaatcaagcaggggcagggccgtacagtgaacttgtcctttgccagacgccagcgtctgcccctgaccccgtctccactctctgtgtcctggaggaggagccccttgatgcctaccctgattcaccttctgcgtgccttgtactgaactgggaagagccgtgcaataacggatctgaaatccttgcttacaccattgatctaggagacactagcattaccgtgggcaacaccaccatgcatgttatgaaagatctccttccagaaaccacctaccggatcagaattcaggctataaatgaaattggagctggaccatttagtcagttcattaaagcaaaaactcggccattaccacccttgcctcctaggctagaatgtgctgctgctggtcctcagagcctgaagctaaaatggggagacagtaactccaagacacatgctgctgaggacattgtgtacacactacagctggaggacagaaacaagaggtttatttcaatctacagaggacccagccacacctacaaggtccagagactgacggaattcacatgctactccttcagaatccaggcagcaagcgaggctggagaagggcccttctcagaaacctataccttcagcacaaccaaaagtgtcccccccaccatcaaagcacctcgagtaacacagttagaaggaaattcatgtgaaattttatgggagacggtaccatcaatgaaaggtgaccctgttaactacattctgcaggtattggttggaagagaatctgagtacaaacaggtgtacaagggagaagaagccacattccaaatctcaggcctccagaccaacacagactacaggttccgcgtatgtgcgtgtcgtcgctgtttagacacctctcaggagctaagcggagccttcagcccctctgcggcttttgtattacaacgaagtgaggtcatgcttacaggggacatggggagcttagatgatcccaaaatgaagagcatgatgcctactgatgaacagtttgcagccatcattgtgcttggctttgcaactttgtccattttatttgcctttatattacagtacttcttaatgaagtaaacccaacaaaactagaggtatgaattaatgctacacattttaatacacacatttattcagatactcccctttttaaagcccttttgttttttgatttatatactctgttttacagatttagctagaaaaaaaatgtcagtgttttggtgcacctttttgaaatgcaaaactaggaaaaggttaaactggatttttttttttaaaaaaaagaaaaaaaaagaagaaaagtataccagataccaaaagctagctttcttatgttttcctttaaattttcagatttaccttcattctgttttcactgatgtcttttgcaagcctttgatttttttttttttgttacagtttagtaatttatattcaccagtcacttcatatgtcttgaacatctgtatctgtaaacatgaatcaccgtgtgtgtacttacagggctaggatttcagtgttgtcagagtattaccacacagcaacagcaacatacagaagatatgttcactcagataagactgccctaaacaaccattttgtcactcagttatttaactgtgtttagctcatttaaatcaaaatgtgtactttaatctaaaatgttttaataatctgtatttcttataattttaacactatgagctgcctgtataagaaatcaagtaaccagaatgcacctataaattatggagcattgtagattttaccacatcaattcatagcagtaactttaagagggcattgtgcaatagttagttgttttcttgttcagctattttaaaggctgctttaacttgtttgtttgtctttgtatataactacttctaatctaatcactagagttattatattctgttatgtttgaccagaattatatgacaagaactggtgacagtttagtgcctctgcccattgtccatgatttacactaattgtgagcagtcttcttatgtgtcagctcattatttttgaaacatttgcctttaggctgttctttgaggtatcaatgaagtgattgaatttcaataccttaattcagtgcacataatactaatgtaacagcagatgaaaattgataaaacccaaaagagagtcatctaaatttgtagttcctatttctgtgggtttgcctggccatggttggagagggaatggtgtttgatggtaaacacagggtgtttggggatcaaggagcctagattctctccctggatctgtcactaacttgctgcgtgacctgaacacgtcactttacctctctgtgcctcagttttcccatgcatgaaaaataaaataaaataaaacggg

SEQ ID NO: 7 - DNA, 946 bp, homo sapiens
gcggcggcggcggctggaggaggagagcggcggcggcgggagcagcgaagggggcggcagggatcctccaggctgccggctgggaaggcgtgggcgacccggtgtgtggcgcgcccagagccccgcgtttcagccctagggaaggaagccagttgagggaagttctccatgaatgtacgtcacaatgatgatgaccgaccaaatccctctggaactgccaccattgctgaacggagaggtagccatgatgccccacttggtgaatggagatgcagctcagcaggttattctcgttcaagttaatccaggtgagactttcacaataagagcagaggatggaacacttcagtgcattcaagatgaagtggtgaagagagcctgcgattgaagattttttcatctcagctttttcccccttaccttgttctctctcatgtttcatgatctgtgtcatagatatttcttcattacgagcacttcgcggtgtggcttttcaatgtctgaagtggattaagtggcccacagtcagttctgtgacttgagtttcaaaagtaaaattaccatcaacaatgtgattcaattttattttctatactagctaaaagcaaggaactatattattaacaatcttggctttactgtagtttaaggcaggtgatgatgatgcttattagtccacctgaaagagtccttccaggtttttggaagctttattcctgcttattaccttgcccttgagaagtccttcatggaaagtggaaacactgggttgacttcttttccccatatcctagttgaaagggacagcttatatgtatgttagactgtccaaaagtgtttgtagaacctcattttaaaaaatcaactgtattgtactttttaaaaaatgggatcttaaactctttattaaaaataataaatggaaatgtgttaagcaaaaacatta

SEQ ID NO: 8 - DNA, 365316 bp, macaca fascicularis
  misc_feature (1850)..(3956): n is a, c, g, or t
  misc_feature (302979)..(303046): n is a, c, g, or t
  misc_feature (358595)..(358695): n is a, c, g, or t
gcggcggcggcggcggcggctggaggaggaggagagcggcggcggcgggagcagcaagggggcgtcaggaatcctttgggctgccggctgggaaggcgtgggcgacccggtgtgtggtgcgcccggagccccgcgtttcagccctagggaaggtaaggcgtgcaggagccgggaactggaggagacccggaccccacgcgcaatcgccgggtccggtgcactggaaagccccggcctgacgccgagtccgccaaagtgcgtccctgtcccgggagcgccctgggcttcccggcaaaaacttggcgccggagtgctggggcgccccgcgctcgcctgggcaccccgggaacacgggacccgggagggggcggcccccgcctttctggggtcgggttccccgcctgtgctgcctgcctcagggtttgcaggagtgaaagaaacgggtagattcctcttaaaaaaaaaaattggggcagtggctcgcggcctccccccacccccagccttcccagcagattttgtccgaggaatccgctccccctcccggaatctccgcggcaggaacgctgcccaggagggggagggcgggcggcgaggccgaggaatcttcgacgtgtcactttctgaggctgtagatttccatatggtggaggaaagagggcgggtgtgcgaagtggggctggaagttggggccgcctctccgcgccggcgggggcagtcgggggcctcgaacccggggatgctctcggggagggtcccgagcccgcgccggcctggctcccccgcccccggctgggcctctccgggacactccccgccccgctgctggccacctccgagcgcgccacgtcctccctccccgtcctgccccccgggctccccccgggctgggggcggtaaccggcggccgcggccggacttggcgagcctggcggctggaagctcgggcgggggagcggggcgcggcgggaaggagcgggcgacccggtgtgtgggccagcggagctccggtcagtccgtcaccccgaggggcgcctcggccgggggtggggcgggcgggcggaatctgctccccgaggcggccaggagaggccgcgcggaccgtctggtgcccgcggctgggctggggccggcaggcgtgggaagggcctgtcactctcggcagaaagtggggcctcgggctgtgcccgcgaactttcccagaggtccgggtcctggcgtcccgtgggagccagaggacccggacccgccgtctcgggagactgggctgcgccgcccggcggcgcctttggcggggaggcttccaggagtgcgcggtcggagttggagcttttggaatctcagctcccaccctgccatcccagacgaagggaagcaatggcattttattcagacattgccgtttgcagacttccttaaaagttataactttttattttcttttctcctcaactcagcattttctttaaacaaaatttagaatttggccgcaatgggtcaacgctggggccaaaaatccacaggtttatctctccatccctgctggtttctagtccccctccccctcttccctcccaggcttaatcatattttggaacgggtgaggtcttttgttgggtgggcacctcctgattgcttgtctgtttattttttaatgtgcaactaatttgatttgaatttcctccagtttccaggccttcctagggaaagctaagggagagggaatatgctttttaaaatcgttttctttctttctccttctctctccttccttccttctccctccctccctccctccctcccttccttccttccttccttccttccttccttccttccttccttccttnnnnnnnnnnnnnnnnnnnnnnnnnnnnnnnnnnnnnnnnnnnnnnnnnnnnnnnnnnnnnnnnnnnnnnnnnnnnnnnnnnnnnnnnnnnnnnnnnnnnnnnnnnnnnnnnnnnnnnnnnnnnnnnnnnnnnnnnnnnnnnnnnnnnnnnnnnnnnnnnnnnnnnnnnnnnnnnnnnnnnnnnnnnnnnnnnnnnnnnnnnnnnnnnnnnnnnnnnnnnnnnnnnnnnnnnnnnnnnnnnnnnnnnnnnnnnnnnnnnnnnnnnnnnnnnnnnnnnnnnnnnnnnnnnnnnnnnnnnnnnnnnnnnnnnnnnnnnnnnnnnnnnnnnnnnnnnnnnnnnnnnnnnnnnnnnnnnnnnnnnnnnnnnnnnnnnnnnnnnnnnnnnnnnnnnnnnnnnnnnnnnnnnnnnnnnnnnnnnnnnnnnnnnnnnnnnnnnnnnnnnnnnnnnnnnnnnnnnnnnnnnnnnnnnnnnnnnnnnnnnnnnnnnnnnnnnnnnnnnnnnnnnnnnnnnnnnnnnnnnnnnnnnnnnnnnnnnnnnnnnnnnnnnnnnnnnnnnnnnnnnnnnnnnnnnnnnnnnnnnnnnnnnnnnnnnnnnnnnnnnnnnnnnnnnnnnnnnnnnnnnnnnnnnnnnnnnnnnnnnnnnnnnnnnnnnnnnnnnnnnnnnnnnnnnnnnnnnnnnnnnnnnnnnnnnnnnnnnnnnnnnnnnnnnnnnnnnnnnnnnnnnnnnnnnnnnnnnnnnnnnnnnnnnnnnnnnnnnnnnnnnnnnnnnnnnnnnnnnnnnnnnnnnnnnnnnnnnnnnnnnnnnnnnnnnnnnnnnnnnnnnnnnnnnnnnnnnnnnnnnnnnnnnnnnnnnnnnnnnnnnnnnnnnnnnnnnnnnnnnnnnnnnnnnnnnnnnnnnnnnnnnnnnnnnnnnnnnnnnnnnnnnnnnnnnnnnnnnnnnnnnnnnnnnnnnnnnnnnnnnnnnnnnnnnnnnnnnnnnnnnnnnnnnnnnnnnnnnnnnnnnnnnnnnnnnnnnnnnnnnnnnnnnnnnnnnnnnnnnnnnnnnnnnnnnnnnnnnnnnnnnnnnnnnnnnnnnnnnnnnnnnnnnnnnnnnnnnnnnnnnnnnnnnnnnnnnnnnnnnnnnnnnnnnnnnnnnnnnnnnnnnnnnnnnnnnnnnnnnnnnnnnnnnnnnnnnnnnnnnnnnnnnnnnnnnnnnnnnnnnnnnnnnnnnnnnnnnnnnnnnnnnnnnnnnnnnnnnnnnnnnnnnnnnnnnnnnnnnnnnnnnnnnnnnnnnnnnnnnnnnnnnnnnnnnnnnnnnnnnnnnnnnnnnnnnnnnnnnnnnnnnnnnnnnnnnnnnnnnnnnnnnnnnnnnnnnnnnnnnnnnnnnnnnnnnnnnnnnnnnnnnnnnnnnnnnnnnnnnnnnnnnnnnnnnnnnnnnnnnnnnnnnnnnnnnnnnnnnnnnnnnnnnnnnnnnnnnnnnnnnnnnnnnnnnnnnnnnnnnnnnnnnnnnnnnnnnnnnnnnnnnnnnnnnnnnnnnnnnnnnnnnnnnnnnnnnnnnnnnnnnnnnnnnnnnnnnnnnnnnnnnnnnnnnnnnnnnnnnnnnnnnnnnnnnnnnnnnnnnnnnnnnnnnnnnnnnnnnnnnnnnnnnnnnnnnnnnnnnnnnnnnnnnnnnnnnnnnnnnnnnnnnnnnnnnnnnnnnnnnnnnnnnnnnnnnnnnnnnnnnnnnnnnnnnnnnnnnnnnnnnnnnnnnnnnnnnnnnnnnnnnnnnnnnnnnnnnnnnnnnnnnnnnnnnnnnnnnnnnnnnnnnnnnnnnnnnnnnnnnnnnnnnnnnnnnnnnnnnnnnnnnnnnnnnnnnnnnnnnnnnnnnnnnnnnnnnnnnnnnnnnnnnnnnnnnnnnnnnnnnnnnnnnnnnnnnnnnnnnnnnnnnnnnnnnnnnnnnnnnnnnnnnnnnnnnnnnnnnnnnnnnnnnnnnnnnnnnnnnnnnnnnnnnnnnnnnnnnnnnnnnnnnnnnnnnnnnnnnnnnnnnnnnnnnnnnnnnnnnnnnnnnnnnnnnnnnnnnnnnnnnnnnnnnnnnnnnnnnnnnnnnnnnnnnnnnnnnnnnnnnnnnnnnnnnnnnnnnnnnnnnnnncttcttttttttttttttttaaataaatgtggcaggaggtggggcattgagaatggggaggcacggtggttgtgggcaaagagtcagaaggagcagacagacccggaagaaaaggaatctgctctggaataacactttttttttgaggcttcaggccttgggcaaaattgcttcgctctgtaatgatttctgctgccggagttgctcctccacccctaagttaaagctgtgaccctaggtgcctgggcaacgccccacagtggatagcagccgggagcgctggttttgtgccttttgtgggggcccttggttccccctcattggaggctgactctgaaatttactggatcagtaaatttcctggctccctgggagcagctgttaacgaggataaagtctttgggcatgtttctggccctgcgaaaggacctcacccatgaaggtacaattctcactttgtttagataccagaggggcacccacaggctgactgagaatgaggcgtagttgattaaaaaaaaaaaaatcagtcattacaaaattgtttttaaactcacgtgcttttaaagtgttgtggtttaaatgactttaagataaaaaaaaattcatctgtaaagatagtgttcatttaaaagatgttaaaactgcaggatctcatcatgaaataggaggttgtagcttctaattacagtatacacaatttcagaaagatattccggtaatcttttaagacagactttataaatagcgcacatcagacgatgggttatattggagagccagtcttctggggtttcttgaagaatgcttgggatctgtgaggaagctctaggctcttggagcctaggtaacagtttactcagtaggagtttgtgctccttttgctcaatactttatttaacctggtagcatttgattgataggttcattagaagctaactagaagaatttcccacacttgtcagtttggaaaatgaggccccggaagggaaagtgacttgtcgagggtcaccattatagacgaaagtttaatacaggattgtgttaatagctcctttctggggtatctgatgtgtactaagcactaattcctgtgcttttatacattatctcattaaaattcgaatagtctttcgatttaggttgtgttatgcacactttacaaataagggcattgagatttacagaaattaagtaacttgcataagatcacgtagctaccaacggtgtcatccaatggaattttcttacgtgttggaaatggttctgtctgtgctgtccagtttagcagccacaaggcacatataactgtctttgaaatgtaactagtggactgagaaacaacagtttaattattttttttggaatggagtctcgctctgtcgcctaggctagagtgagtgcagtggcgcaatctcggctcactgccacctctgcctggcgagttgacatggattctcgctctgtgtcccaggctgcagtgcagtggcgcgatctcggctaactgcagcctccgcctcccgggttcaagcgattctcctgcctcagcctcccgagtagctgggattacaggcgcctgccaccatgcccggctaatttttatattttttagcagagacgggttttcaccgtgttagcctggccggtcatgaactcctgacttcaggtgatccacccgcctcgggctcccagagtgctggaattacaggcgtgagccaccgcacccggcctaagttttatttacttgtaatttccacttgtggctagtggttaccatactggagagcaaagtgtagaactttttgactcccaaatctttcacatgtagcttggtcatattgctctttattttactttgagacagagtctccttctgttacccaggctggagtgcagtggcatgatcatggctcactgtagcctccacttcccaggctgaagtgatcctctcaccttagcctctccagtagctgggactacaggtgtgcacgctaccatgccaggatatttattattattattattattattttttttttttgtagagacaggtctcactgtgttgtccaggctgcatactgctcttcagatctcttagttcatttttctttcttctatgatatcagaagttacattcagcccttaaatggaacttaaagaccgagttagctatagctcaactttgctttcctatgtagagtggataaaatatgcatattatttgttaactatttggttttaaaaacaatgcttacatgtcatagttaaagctggtgggaagccaggcgcggtggctcacgcctgtaatcccagcactttgggaggccgaggcgggcggatcacaaggtcaggagatcgagaccacggtgaaaccccgtttctactaaaaatacaaaaaattagccgggcgcggtggcgggcgcctgtagtcccagctactcaggaggctgaggcaggagaatggcgtgaacccgggaggtggagcttgcagtgagctgagattgcgccactgcactccagcctgggcgacagagcgagactctgtctcaaaaaaaaaaaaaaaaaaaaaaaagctggtgggaaaaactttaaatgacatgttcttttttgttttaatataggaattgtacataggaattgctgaaaaagtagtcagagcttgttggttattttagtgtaataaaagagtacaaataggaaacaatatgaaaagtcagtaatagaaagttgaaaaaaatgatcctctcatacccatgttcatccgttcattggacagttcttttcagatgacttcataagtatcagtaaaccattattcacttttccttatgtagctgcagaagtaatctgaagaatcaaaattattcttttactatcagagtataaaaatcaaatatcaaacacattggattcatccatgaattgggaagaatatgtgtaagattaaaacagtaagaaagatctgtttgatgcagatgatcaaatacttttctgattagtggatttaatttaaattcattgaattttagagtttcatttgctaaaaggaatttcaacaactttctgattttgtatggaatggtgaatattccaactcatgttaaagtaagcattcttttatctagattggattctatctatacatatcctataacccaataccttttttttttggtgcactaccctcaggaaaaggcaaattataatgtaatctctttttattaggatttttaagaggcaactgccaggttcagtataagtatatctgaatctactgtatcttccatagttatagtactgtccagggataattgcagttcataatctttagacatatcctgaaggacctatgtctgtaaattatcttaaaattgttctaagttattttagtgttatgtgaattacattgcttccagctctttgaaaattgttaattcaactgcaggtaaggcgtcagttactgagactgttcagataactgaaacatcctgttcatacccattcctgaccattgggaccactgtactattttcaaggataagataccactgtactattttcaggataagaaccatgttataaataggattatagtgtcctagtgagtgtgacaaatataggaaacatgatttaacccatgacatatggtttgatttgtaggacatccccaagtgcttaatacaaatgacaaatttactataattttaaggaataaagatgtttaaatgatggacaaagattgagggccacatctgagcatcagtttgaaatcagaatatcttctctgccaagggataactttactttctagctgggtccttgataagcttttgaatctctcttagtctgggtttcctcattttaatataaggaggaaagatctaactcataccttttcaaatggttgtcacaagggattaatgagtcagtgtattgaaaagtgtttggcaaagccttatacaaaccccatagttcattatattccaaagtttaaaactgagctggtcctatggtatttctttgcacattttcagagacctccaaattgtgcttggacagttggaaaaatgatttatttttctctttgtgatcagtaaataaggtccaagctttagatgttgtattttattttcaccccactcctaatggaataggtgatttgtgacctctccaaagttgtactgtacgtaagttgtcccatatctgtgtttttgggaagttggtctctagctgggctagtgttgctgaagtgggcaggccaggcttgattcagggctgtttttgaggtgggggggggagaagtgcagtctcttagaggaactttcagtactgaatgatagagtcataaggttttactccttgtatgttatcttagcctattacttgagctttcagcaattacagctaagaatggaaaagaatcatattttcagtgtaggggaatctttgcaacctacctgcctttccactttagaaatcacaattgccttttcttcatgttaatgaggttaatccattaagtgggatttttatgtggtaagacattattttcaagtaaattaattctcactcttaaagctgttgagaattcacttaggtggttgaggagaagctttgtactttagtttctgagtgcctttatatatgtattttcccttaaaatatatagtatggttatggcattatgtgttttaaagagggagagaatgcttgaattattgtggctagataggggcaggtagacaagcacaggcccaactggaaggacgacttgatggtacttgagcactttgcaaggtatatccagtgagaggccagaccctagtaacaagctcacctggaggggagtttgttcatggtgcaggtttaatgtcaaggaccagttcttggaaacagaaggtatgtcgggtgccaattgaagatcaggggacagaaatgtttttaaaaccaccaagtataaatcacataagatcgatagacagtcgtgatcagccatctacatacagatgaggatgtttgtcagtttgaaaatattcgattcttgaatttttctttgtttctccccggttaagatatgcaagtttagcgttctgtcagtgttggatcagaatttctgatgcccttggcaatactcagtgtcagtttagacattgccttctaatttttttttcttttccttttttaagatacagcatttcactgctgctggagtgcagtggctctatcatagctcactatggcttcgaactcctgggctcaagtgatccttccacctcagcctccccagtatggctatagctaggactataggttcacgccaccatgcctggctaatatttttttttatttttatagagacagggtctcactttgtggctcaggctggtctctaacttctggcttgaagcagtacccctgcttcagccttccaaagtgttaggattataggtataagccaccttgcccggccctgttttgtttttataatatcattaaaatacctcatcagcttcaaataaccattttgtggggtggtgggggatttttcagaaatggtgttgagtcacagtgttatttgaggttctagtaagtatcaaagtgtgtcttgtgttaaatgattctttttgagcttaaaatgtaatttcatttcagttacttgtttattgactcagaatgcatattttgagatctagaccaggttctttgttaatggaatattctactgtgttctgatgtttttggaatcttgtatagagaacagtatctaccaccaaactcctaaggctggatggtggttaagttcaattctttgctaccttctgaaatttgagaaatactaaaactggagcaccttcaggctgtgttagactttaagccttctaaattatattagaatttaaggatacatctttgtttttaccctggaaagagtagtaaagattttcataaaggccaactagtcataaaaacttacttaaatgatcttaactcacaattatgaaaagttttctgttgaaataattgtctagaaagtgatctttatacatgaacaaaggtaggatgttttagaaataattgaagattctaagatcccaggaaatataatggtttaatttatttttaagggatttaagattccccatagcctatgaaagaggggtctctattaaaaataactccattgttctagatgtaactaattagggatttgcaattatccaggcaaggctaggataaagtttggctgcctattctatatgaaaaggttttactgtaaatatcaagtttaaatagatctttagaggaatatttacctaattaaaagaacaaaccactttttaagcaccttgggaaaaatcaatttacttaaaagcagtgtaaaagtgcagaatgcattcactgatgctggactgctggtggtcttttcatagagatacagaagcccctggaaagtcagtgttctctgtggattgccatgaaataaatgttgattgactcaatgctatcatgtgaactacaaacagtttaccagcaatgggtagaactatattatttgcttgcaaaatatatcacaacaataagcacagtatctgcctccgccaccccaccccactccactctaccaatagactgcaactatgcctatttattggttttggtgtttttctagtgacatttgttttgctacttgttaacttcttttgtcacgtgtaagcatttgatggcagattggtgagagcaggtgttaaaagtttaagaacatcattattgcttttagctcatttcttctgccttcgtgtttgggcaggattgtggagagtcctgagtttagtatttagataagctaaaattacatgtcctcctcctctacttttactaaagcaagattctcctgggcagcttagttccaggtactgtatgaacttgccagtaacaagagtaagtttcttttaaaagatttctggatattttatgtttcatactcagttactcatatgcgacgttttctagtatgtgactacttaggggtcagatttgaccagttttacagtacaagttgtacgtataggatacttaatgtatttctaggacattatgcttcattttctcttaatattttaaaggttttaaaaaacccattctataccttctatatcttttactgtttaaatcattcaatgggaaagaaaataataaaagtctttagatgctgtttctgatttttcgatcatggtttttttaatctcaagaaaaataattctgattaagaaatagaggtaaacattattctgaagtagtgaattagagaacacttaaatatattgagctggaatccttgtgtattgcttttgggaatgttaaatgatacagctactgtggaaaacagttttgtagttcataaatatttacacatagaaatactatgtgattcagcaattccattcctattcctgtacgcaaaagaaagcagggactcaggtacttaaaagccagtgtttatagcagcattattcacaatacttaaaaggtagaaatgatccatgtctatcaacagatgaataaacaaaatatgatattatatattggaatattatggtacagtggaatgttattcagctgtaaaaaggcaattctaatacatgccataacatgaatgaatcttgaaaacattatgctaggtgaaataagccagacacaaaaatttaagtattgtatatatctactggcatgagatgactaggatgggtaaattcatcgagacaaaaagtagaatagagattaccagggcttgggggaagggaaaatggagagatagtgtttcatgggtttagaatttctgtttgggatgataaaaaaatgttctggaaatgaacagtggcgatggttgtacaacattatgaatgtatgtaatgccactaagttgaatacagaaaatggtaaattttttgttatgtatatcttatgacaattaaaaaatgccaaagtaaatattgaagatgtatcctacacagtctccatatgcctgtttactccccttggtctacttcaggcaggtatataggtagttattttttcctcatctctctgttgcagtgtaaatggagatttccctaggccattttttggagatcagagagtttccttattttattatctgacttaaatttaagaggaaaatgtttaaaagtagatctctggaggggaaaaaagggcattttaatattgagatgaatcagggagtttattaatatttgcagaccatgtaagcacatgaagataatctatcctgaatagcacagcgagtcatttagaaatccaggagtaggtgtacaatcggacctgtcacattttctaacctttaaacattgtttttttttgagacggaatttcgctcttgttgtccagtgtggagtgcaatggtgtgaacttggctcaccctgacctctgcctcccgggttcaagtgattctcctgcctcagcctcatgagtagctgagattacaggcatgcaccaccacccccggctaattttgtatttttagtagagatggggtttctccatgttggtcaggttggtctcgaactcccgacctcaggtggtctgcttgcctctacctcccaaagtgctgggattataggcatgaggcaccgcgcccggcctaacctttaaacattttattcattcttgacatcattagtactgtggaaaaactttgatttctgtttaagagaaatggtctaagtcatctctttactcatgttggaaatgcattaggtgttagaattctttagttccttagactgtaaaaccaaattacaaaagggatagaatggaagaaaccacatatattttgttttattcctctgaacttgtctctagcatctaatgattgcatagtaggttctgctccctctgttttttcttgtgaggtatttgatgttgagtgtagctggatcacatttaccaaaagatgggcaagattttcatttaatgttgggataccaaagcctaaacgtcagatgaaaagtacgtatactcaaaatgtcagataaaaattctaatggaaagatttaaattcaaatgcaagtaagttcttaaggaaaattacataccattggctaccacaaaatgtttaccattcattccggaactcctggaaaacagtgtcagattacaagagtgtgatagtaatgtgtccgtgcattctctgtgggtatattttctttttcttttttttttttttgagatggtgtctcactgtgtcacccaggctggagtgcagtggcatgatctcggctcactgaaacctccatctcccgggttcatgtgattctcttgcctcagcctttggatcagctgggggcacgtgccaccatgcctggctaatttttgtatttttagtagagacaggatttcatcatgttggccaggctggtctccaactcccgacctcaggtgatccaccagccttagccgcccaaagtgctgggattacaggcgtgagctaccacgcccggcctctgtgggtatcttttcttttgtgtgtgtgtgtgtgtgtgtgtgtgtgtgtgtgtgtatagtgtgtatatatagtgtatatactctttatatagtgtgtgtatatatattgctgtgtatataaatggcttgatacagctccactcaatgagcttttcataccatagctatcacttttgtggcctactaatttctctggcagtagggtcattactatatcaaaaggtattgagagtcatggtctcctcatatccgggagcgatatgaagaattactacattgctttagaatgctcttaaatgattttgggctattcaaaagaaaatgatctccctttttttgttttttgtttttttttttttgcatatccttgttatgttccagagccgtcattttagataacttattttcttttcttttttttcttttttgagacggagtttcgctcttgttgcccaggctggagtgcaatggcgcgatctcggctcaccgcaacctccgcttcctggtttcaagccattctcctgccttagcctcctgagtagctgggattacaggcatgcgccaccatacctggctaattttgtaattttttttagtagagacggggtttctcctaacttaaccattttcttaaatttcttctagcactttatctgtacttttcagaagacttgactttttcatcgttgcctaatagtctccttgtctcccttatttgtgagtagggggatgatttctgatttaacttggggtcttttcatcgtggatacacagtaaatgttcatttgatggctgcgtggctggatccccagtttgaatgtaccatttaaacttagtgcctttcaataagaatgatacagtggactttggggactcaaggggaaaggttgggaagagggtgagaggtaaaagactacaaattggtttcagtgtatactgcccaggtgataggtgcatcaaagtctcataaatcaccgccaaagaacctactctctttggaacatggcctatatttggcatttttgtgtttccatgatgttcttgagttttttcctccaagtagggaactaataaatgtttaatcaaacaaatgaagatgaaaggtatgagtcacctgtagtgcaaagctagctttttattcattgctattttaaagaaatgaatgttcttcagagaatacatgacttttttcatgtctctattagattgtgaattgatttggaaaattctgataaaaagccgtatttctgttccatgaaaatatgggccctccattacatgcgttttgtttattggagtcagttcaaattatgttaagggaattattttttaaaataatgtaacttttcagaggtttgtggtagttttaaatgatccttttaaaaaataatctttgtcttttttcttttttcttttcttttcttttttttttttttttgagacagggtctggctctgctgcccaggctggagtgcagtggtgcgatctctgcttactgcagcctccacctcctgggctcaagtgatccttctacctcagcctccggcaaggtgctcagctaatttttttttttttttttggtagagatggggtcttgccatgttacccaggctggtgtggaagtcctgggctcaagcgatccgcccgccttggcgtcccaacgtgctgggattacaggcatgagccacgcctggccttaaatgatccttttataagtgaaattctagaaaggacatattaagggacagaaaccctctcctcccccaaatgtgccttgccgagctgttggaggctcagctgaaagagttgattctggccaagtgttggttagtgctaaactaagccatggagaaagggtcaaagagcatgccttggaaagaacttgaggagaatgacctcagctatttgcagggggagttaaagactgttaagagaagaatctcctgggacattatagggctgtgtgtttggagagggcggtgcctgtggggctcttgttctttagatctggggtgggatctggaaatctttattaagtgtttcaggtgaattatatgatcagacaagtttggggaactcggagttggggagttggccctcttggtattctgtccctttaaggttttcaatctaatggctggaaagaggtgagaatagtgcttagattaaaggattccagttaggagatagggcaaaattgaaggttttaatcatcatattccttggagtaaaatgatagccagctattggcagttttatatagaaatgaggacacttttgtgcactgtacttccaaaccctctgaccacaaggcagatgtaaaatgcagtaatagtggccaacaattttccagcactcactacttgccaggcactttcatgtaaatacgtattccatccatatgtatattctgtgtgtgtgtgtatacatctatccatttatatacacactttcattaaaaataattctggaagatactctgtttttctgtaggtgtttccagtgtccacaacagaagctggtacatattgagtgcccccataagtgttcattgagtgaatcaaagatgagaaggcatactcgaaaacattaaaacactttcctagggtcccttagagtgatttaaaaccttttttcagctgtatctcatggcttctcagtagttcaggttcatgatcttatttgtatctctagacttggcacagtgtctgtgttcccaggcggctgaatacgaaggctaaatattagctgaatgccttctacgtgttcaaccggtctgttgtctagaaaactaaaatctaggctgggtgtggtggctcacacctgtaatcccagtactttgggaggccgaggtgggtggataacctgaggtcaggagttggagacgcacctaaccaacatggtgaaacccgtctctactaaaaatacaaaaaattagccgggcgcggttgtgggcgcctgtagtcccagctactcgggaggctgaggcaggagaatggcgtgaacccgggaggcggagcttgcagtgagccgagatcgcgccactgcactccagcctgggcgacagagcgagactccgtctcaaaaaaaaaaaaaaaaaaaaaaaaaaaaaaaaattttcttttgaaacaataatattctggacattttccaaggggaagattttcctagattgttctctgtagtagcaacttaagcttagaatgaaagaaaccagagaataaaagtgtacttcatagaaagtaatgtataagaaacgcaatagagtgaatgggaaaaatctgaggcagttggttaaacgatagtgaagttttaccttattcggacactctaagtgaagttttaccttattcggacactctaaacactctatgaaagggagtccttttactcactggtacaacagttctgttcatccccagtagctttcatttaagtttataagaataagatgctattcctataatttgcacctgggaaagcaaatccttctattcctaatactgtttttctccttttaaggttaatgctgtttggtggtttaggttgtacctaaggcagccacagggaggggatgagcaatggactagagggtgtctatctctgagaactcagaaagcagctcctgcagttaattaaaggtggcctcaggattcagaggagccttgtgctttcccagacggcccgggctaaacctgggtagctggcaaccctaaatgcgtcctttgttagaaatcatgtagggctcgactccatctttagaaagtgagttcactgaaggtgagttaaggacaaggctctgaagagcggcctgatttgcttctttccttgtgtttgtggagtggtgtggacaaagagactaagtgaagatgcagccccccaaggctgtgttgcctaaaaaccattcctggcttcttcacaggaatattccttgtggtctagaaggagctatgtgcttctctggagattgtttccacagaatggtgaggactgttagaaccaccttcttctttctctcctgtctcaggagggaggctgtaagtgctaaaatgcccccgaacgggggcgtgggggtgggcagcacctccagagaagtggtccttaatgctggctgcccacctgacccctctctctacagtaggaggcagggaagcctttgcctccttccagctttcaggacttgctgtggtgggtcctcatgatgcagatcaccatagcactgaatttattcctaagagtatatagtttcttaaatatcaatattatacctcaagatgtaaagagaacagttttaagcatctatcaaaggaggaatagattgtaattttaggatttgagtgttttatttccttatatttctttaaaattgcttggactctcttctctctaacctcacacactttcaccactatcaccaaaatttgctttgtatttatactcatttttaaagaaattactataaaatcagtaatttggagtcttttaggaagttcatcttaaaaaaacgcccctttttttcttttaaagcaaggtgggaggagaagaaatggataccaatttttaaggtttatattttatttcaggctttgtttagcaatacatatcttaatgtactatacaatttcctcactaatgaagaaacataattatttccagttttatttgtttttggacctatttgctatgtgattattgtcctgtagctttaattagatcttattgacacctgtggcaatctcaataatttgaaaacatagctttttagcttttaccatttgcttattgtattcaatttaaacagggaaacagtgtcacttcctgtttatgtttcgctttgcagttctcttaaattagttcagtgtcctcgggagttcattcaaacctatgaggacatactagttgacaaaaaaagaacagaggattcaaataaatgtctttaatagattattttagcttcatttcatttagtgtgattttgggtccaaagtgtttgccattaacgttctaattgcatgtttgtcttccttgttttcgtgaggagcaggggcagtaggagtgagtaggggagaacaggcgatgactggggaaggatgtggcactgatgaaggtgactgagcttgttcccagtatgtttcatgtgggatggcaggttttctaaattctagtttcctctgggtcattggtaagtccaatagagggacgattctagcctgatgtcagatgtcctgcttagcagactaatgaaggactttttttttaaaaaaaatatatttttaacacagattggtgtatttgtatatcttcagtaagtttcagttttagccaagaaataatctttcataacgtttttcatgagaaagcatagaatgattttctagaaagtttaatggcaagatgtattagatgaaagggaaacttttttttttttttttgagacggagtctcgctctgtcgccctggcaggagtgcagtggccggatctcagctcactgcaagctccgcctcccgggtttacgccattcgaaaaggaaacatttttaaggagaccatgcttcttgggtattcttgagcccttgtctgtagataatagctggttaaacagttttcataattggaggggatatgggaaactactcacttaacttggagttgatatttttggagttaatattttggtgctctggaaacatctgagtttgggactgtactgtgcacatctctcactggttaaattgcccagcctctcagtgtcttcttaggactctcagtgttttatgctcagtctctctgtgtcttgttacgactgtttggctcaacatagtgttttgaattagcgattagtaagtggtagctgctgctgttttattattttattgctttattctgtgactacagacagatttaattgttggatgtatttcttaatgggataattatttaaaaacattcccagttactttaaaagcatatgtgaatattagccatcagttttgtcttgaccatgcctttggctccttgggtgtccctgttcatgagacagctttccagctcatccttaatgtcatactcgagccgtttatcttagtgaggtagtgtggacctaaaatgaaataacatatatcaaaagcacctgtgggggaaagcgcatctgaatgccaagcagtacttagttattgcaagtgctacttctaccaatatttttcttcctttctgcccctttaaagagaggttgtccctttttaatagatatatgacagctctgcttcctttcttaagtctaagatcaaaggaacgttgtaataaaggggagtcactccctcccattccttctctgtctttgtggatgttgttctgttttttaagagagatcaggtcttgacattagtggatgcagctgtggggctcccaagccctgcctttcatctcttggtcaccactgcagacagtgttcttcatctctgtcatgtgtaaagacaccactgtgggggaaccgtgccttgcaggttaagtacgtaaagtatttctagagatcctagccactcgttgttgtttggatgcacctttctttgaaataacatagaatgtttggcagagatgtcgatcaatagaatagtttctctgctttagaggtacttaaacctcaccagcttcttgtaaattggaagtctagctccaaaaaagtaaaagtggttgggggaagaacgaaacttttacaggcaggttttttctagacataaacacagttgaatggaaaggataatagggattgaagcctgtcttgctctatgagagtgaacgagctaatgttagactttaatgctgaagaaaaataacatctaccttttattttttattttttaaacgaggcagtcagtgcagtctaactgatgaaaattaaaggtcaatttcttctgtgctccacctcagtgcatgccttgggccatgttaataatgacaatcccattatttccttgcagtaggcaggaaatgctgtctacacccattagatttgtttgagtggcccctggctggaaatgaagaaaatttaattttctaatttgtagggaggaaaaaaaagcatacagtgctacatagaggttgattcttgggctggaaggagctgtcatttttaaaaacttgaaattctgaatattattgggacatttggccctaatccacattgaaatcatgtatggacttacgtgcaagtgaggtgtctaggaaaccttttaaaatattgtcagaattggcacaattgtggacgttttaaccacatgtttccaaactgcctagttgctcacatgtcccactggctgctggaaacttgcgtggaggagggctttgtcagagctttctctcagaatattagttttgcttttcagaagcaacattcatgttgaagaaaatctgtatattcattagggtaatcgattactttgtggtttcaataacaacaagaaaaaaattatgagtgttacagaggaaaaaaatgtgaacctgtccttgtacattctaatcatactgccttgcagagttacattccctaatcttagggctgacttggtttctgctacttttatgtcctttaagaatgagatccttaattgtctttcttttttttttttttgtttgtagcaagttgatgtccctcttacatttttccttttttgataagccaaagatttttattgctattttgatcccttatttggtttattgggatgttctattacagatcctcagttggtatataattcattctgagatactcaatatcatactttcccatgaaatacacaatgagaagaggaccttaagttgaaaggacttgcttgaaatcagaggagtagccaatactacaagaggcagacattcagtctttgtgtctagaggaggcagagtaaatcatcttattgtaatggatctgtagtttccatcaaacagaacctctcattttagcatcataacttccggtcatatatttgttttgtattgactgtacatatagagcttcttcgttgcttcttgaaatgatatattggaaaaacaaggagtttctaccatcttcataggaatatagcagtgaaccaagaaagttttatgaacattttcttttctctgtgtcttaattcccaaaacctttagcagtttgcctagagcagtgaccattttgcctctgacattttgtttctggttttcatcaaaaccaacatcttccataatgtttattttccttatttacttgtcactataaatgctcacaggaagcagcaaaacatggaattaacttttttaataagtgtagtactagtgtaacttatatgtgtgttttttaaaaatacattttgatgataacatgtaacataatacatatttaggggagcattttaaaaatattttccaaatttacattttgcttaaaagaggggggtttctagtggcctctttgatattaatagtaagaagtcctgtgatccatagaccttccccatgggtttttggataactctcagattagttctcctcaggactcctgacactaattgttctccatggcatgtgggaatttgaagcgtgtatataaaagagttaaaagactgaaaaatttctcttgatactcagagagcttttggaagtcaaaattttcatctgaaaaattgttttcttgattgagaatttaggtttgaaagtgactatggattattaactggccacctggcctctgttatagattatctgatctatttatttgaaatttatctagtatacttaaatttggcaagaaatcagggcacaaatacaagttaggcgtattgtttatttttctaagtcaataacacaattcattttgccatggaaaagtaatcatggaaaacattaatacctgatagactatataaacttgcttaacttttagcataatgatatttttccaggatgctgaccgggtggttttatgtaagcatgtttatctatagtccagtgaattaaaacttttaggcaaataaagggcatgtatcacttattcctaaggcagttccttttgaatgattcagttattgagaactgtcattttgaaaggtttcaaaccaattaggcatctttagatctaaatcttccagccttcagctttagggaatacatatttggatttgcaagaatgtgaagatttagccaggtagtcacttcctattagctgtgagaggtctttggactcaattgactggtgcttgttaaatacctgtttttttttttttttttttttttttttttggagaatttgtttccctcctgaagagagagccctcatagtcagtgggacccgttgacaattctcaaatactatcttttaggattctcatgactcagttttgtggtgaacttccgaataagtaatgaaagatggtagattttaatttaaaagtatagattcttttagctgtcagtcctgttgctagggtggggagtggtagtggtgtgctccttcaggtgagagtgtagtggtggtgggcagagggtaaggcacgtttatgagttggccccacaccaggcttttctctgtcttccctaggccatgagactgattacttactgtggtgagagaaaaccctaaaggcccactccacacttctcatttgccctttagaagacctagaagattgtaggaacagatggattgcatgaactggtacctgaagtttagggagccatcagttcaatcagaagttgtatttatttgagtgtagctgtaaagatgtggtaagagaagaagcagggagatgtccaatgtccaattcctctttgtttgactttcccactaaaatctaaattccttgaaggcagagaccgactctttcctcttctcttatatatagtgactggcaaacagactggtcagcaagtgtttattcaacgaatgatttaatgatggagcaggacatgttttgacactgagatgccatatgtttgaaccagctgaaaacgtatgtttgattttaattttaaagccatgttctaattataattgttattattggaggcatatggaactttcaatcaagaggaaaaactgagatacttcaaattatgtgaagatagaaagatttttcttgtttagtcaagaattattgcattgcaggtaacagaaacccacttaagctagtttaaacaataaaggtttgaggaaaaggaaggcagtgtttctatacctcctgagctcctggaaccagccctgggaaatcattggaagcccaggttgcatttcttcttttctttggtcttccttccttgataattctctttttgtagagcccatcctatatgaatgatggatgcttattctaaattcatgaagtaataccaattttttcttttaaaatggcctggtctgcacattactttttttttttttttctttctttgagatgaagtctcgctctgtggcccaggctggagtgcagtggcccgatcttggctcactgcaagctctgcctcccggattcacaccattctactgcctcagcctcccgagtagctgggattacaggcgcctgccaccatgcctggctaatttttttgatttttagtagagacagggtttcaccgtgttaaccaggatggtcttgacctgacgtcgtgatccgcccgccttggcctctcaaagtgctgggattacaggcgtgagccactgcaactggcctactttttaatagtaaattgaagttatggatgatagatatattctttgaaagtagttttgaagcagattcctttcccaatgtgtcatgtacaatctgtgggggaggaaggttatataaagtaagaataactgctattcaacaaaatagtgatattctatattttcatgtctcttttgtttctttctttaaaatgaacttcagtgagacatggccagattgatttcttcccttaaatcatctcagaaactgtacccagaccattaattgctttgttcagcggacaggaaatggttatatttgtacaagttacacaatcttaactaagtcggggcaaagaaccaaagagatctctgatctttttttccagcattaacctttcagttccacaaactaatgcatgatgcataaaccaggttactaggggacaactaccgaaaaccataaacttatttatctgaatgactttcttttagggatactaataaaagaagttacatgaggtaatcatgctggtgctgaggttaagtttgtgcagtttcacttctttctttaatagttttttatacatgcaataaaggatatgtccggaagctgatcagtgccagcattaccatgaagtgctcggtccccattccttctctccttacccctcagcccccttgcaggctatatatgtaaatttattcttttccttttctagagttgggaatttgcctcctttcttcctgcccatgtctgttactggtccctagtaccccaatttctgctacttttctcttttttttttcttttcttgagatggagtcttactccatcacccaggctggagtgcagtggcatgatcttggctcactgcaacctccgcctcccaggttcaagcgattctgctgcctcagcctcccgagtagctgggacgacaggtgtgtgctaccacacccggttaattttttggatttttagtagagatggggtttcactgtgttagccaggctgctcttgaactcttgaccccgtggtctgcccatcttggcctcccaaagtgctaggattacaggtgtcagccaccacggccacttttctccttcttgaaagtgggattttctctttatcactgtttgattattgtgtaagtattatgattggcattttgcaatttgggcagagctgattttatatatgatatttctaagtcctttttttttttgactctgccaaactcttaagtcactatccatccatcctcttctcattttgacttctattagttatttcctgaagcccatattactgagaaaaagttaatcttaagtaagtgaataacttaggtctaaatgagaggagaatgaagaattaagtgaatgtaggcagagtcagaaaaaaatagtgtctctctttaaagcattactttttggtgacacctttgaaggtagtgaaattgctgtatgatctaatgctacaaaaccacatcttgctctcatagattttaagatttctgttttgaatgatccattgctgtcctttgtttacacgtatcttttctccctatcttccttgttaaatacattttttgttatatacttttgaagcaagtcttgatttttctgtattttccccatttttcttcaaatgttccacagttccctaaaataacatagcattctttgtcttttcctacagtctattctttgctgtttacatcatccccaccccccaccactgaaaatgccttcagaaagtccctaccttttcttgtacattgtccttctgttcagattcttgcattgctgatactctcccctgctacccattctcctcccaacagttttctttgatagtgatatctgccttagaatttccactgtacctgttaaactctttgagaagggtaattctgtcaacgtttacttctcttccccttctagccccaaagacccaggacagagtgtcctcctcatgcattcctgtgacaaggaatctgcgctgaggtttctgctgtttctcttaccaggattctgaattgtctgtgactgtctgatatgattgctgatctctttcccgttctcagataggacacaaggattccatttggagtgggctcaggacattcggatgccattattttagtaatgattacatgatgttttgagggcaacctgaaagaacagtctctaagagaagagctgggtaaaatcagagtaggacgatctctaatgccttttctagctctcttactctgattttgtgaatttatcctcagggatagtttttcaccagaaggatgagaccctgctgtggtctgaatgtgtctctctcccctcaccaaattttatttatgtgttgaaatcctaaaccccaaggtgatggtgttaagaggtggggtctttggaaggcagttacatcttgagtggatccctcatgaatgggattcatgcccgtataaaataagcttaatggccaggtgtggtggtgcaaacctatagttccagctatatggaaggctgcagcagtgagaagattgcttgaggccaggagtttgagactgcagtgagtgaataacccctgcactccagcctggacaacatagaagactctttctcttaaaatagatggctagattagatagatagcctaagggagcctgattgccccctccaccatgtgaggacacagcaagaaggcaccatctgtgaaccaggaaaggagccctcaccagacatctgatttgttgatgccttgattttggacttaccaaccccgagaactataagaaatgaatttctgttgtttgtaaattacccaggctaaggtattttgttaaagcagaccagatggactaagtcagccccataatgacctgttttatatttttatttataatttatctgctgcttaattttgtgattagtggccagctactatttactcatcttttattcatctgtaaaactcctgttaacttgtctttgtaagaaacagtttgctaacagatgagttttcaggttgttcagttttaaaatgttttacttaaaaggataagacagctccccaatgcaaagagtgacttcagagataactttcatttctttgaaatgtaggaagtccatagccattgctggctgctatctttctactcaatatgctccaggggaagattatcaaattttagcctctgagctttcaagtggcactcattatcaatggtgtattacatgaaactggtttttgggctcttcaaatttatatttttggcaaaggtgttgggagatttgatttcattcatcatcactgtagtacctggcacatagtaggctctccatttggtgtgttggatgaaagaagaaagtgattctgttagtcagtgaggtttaaaaagaagtgtccaccaactttatgggtcaccattgatcttgagttcaactctgttgccctgtatatatgtgaccccatgtttattgcaaccttataggcatctcaggcactgctgggaacagactcttaaaatttctggtaggggccacatgcggtggctcacgcctgtaatctcagcactttgggaggctgaggcggacggatcatgaggtcaggagttcgagaccagcctgaccaacatggtgaaaccccgtctctattaaaaatacaaaaaattagccgggcgtggtggcacatgcttgtagtccccgctactcaggaggctgaggcaggagaattgcttgaacccgggaggcagaggttgcagtgagccaggatcacgccactgcactccagcctgggcgacagagctagactctgtctcaaaagaaaaaaaaagttttggtagactcctatgtgccatttctggagaactgaaatagtagtggacatccttaggattcattttagtgtagatatggctgtttctagtgaaacttgaagtcctacttcctgtgtgtgaaatagggtaaaaggatcacactcgaaaaaatgccgccttgtgcaaaagtgacaggatcgctgttcagtttggaatattggaaagtgggcagatttatttggaagcactttgtttttactacatgtgtaaaactccagggagcattgaataggatatgaggtgctccctttggctgtgcattagcaacgtggcagttactgatctgtcatttactttgaaaaggaattacaaagttttggcctcatgcctggagtagctccagatggtcagaaaagatttttgtactgaagtcagaaagtatattgcagtgatagaattgggcttgtcatgtttatattagaacactggcttcccactttatttctctgcaaaatttttctttctttcttttttcccagagagtgaggggaggaaattgtttctttagagttacgagtctaatatttggaatactgttgttcttggtgatagtgatgtagaggtatgatatgtggttaatgtagttactttgtcaacctaagtaccccgatacttagtatttacaaaggatgcatgaagacttggaatgtagagatacaccaagaccattgtagctgatgtagaaatgcaggtaagaagcttgatttgggtagcatttgcttgtctgataacctggctgttagcccacaactgttatttagtagctttccaaacttcatctgttctgccttcccatgattctgtagttgctaggggtaacagtgacgtttgggtgtttagtgtgggtgggaggtgggcctggggagatgagcagcgaggcggtaatgatactaacgccaagttttgccattctgggcattagtgcatcttttaaattccactatgaccttgtgtaccttcgtatcaaccctggaaggggaatgatgtgattcctattttcctgatgagaaaactgagacttagggaggtaatatctgaccaaggcaatatctaggtaactcccttctgcagcctgtttacatatacttttggggaaaattattacagtttcctgtcctttcaggacagaggtggctacaggcttcaggaaataaagctcattttcctctgggaaactcaggacttgtctgagttgagccatttagtaaagcttggtcacaaggctcagattaagacctggatctacgtgctgctgttcccagactgtttttcagttactcttgtggttactgagtaacttgggagttagaagaacattaacaaagttttgtgttttcgaagaaaatgctacacatggagaagtgacattaagttgcatacttcagaaaggaatttttatctgttttgagattctggtatataaattgaaaataatttaaagaaactaattttgattattatacttttaattggtggcacgagtatgtgaacataggtagcttttttgaagcacttttattgaaaggtataaaaatttttgttgctgttgttcagtagctgacatgcagtattctcttattgtggatttaggggtcttgcaccagctcacccttttctcagattgcagctcttccttcttgcttgacgtagagtggtttctaacttggttccttttcctctatagatctaagtcctggtccacagtctcctactgtcacccagtcttccatgagctgtcagaatcctcctctaggcttttattattctgcttcctaattttgtccttttaaatttccactgtttagatattattcaggcagcagtggtaattttctatatataatgtggtgctatagtttataagttcttttggggttgtgtcttaaacagcaagagtggcctgattgatgtgctttttgaagtcttactacctttttgatgggtaggatgaaagtggtgtgaagatgagtttgtctggcttgctgtaaatctgatctgtaaggcttttccgtgttcactaaggcaccagagtcggactctcctttttttctcgtttgatgttactttattacacttatgaatgaaatactaatgctattattttataaaagatcataaaataaaagtacacgttcttcgtgttttatatgtttctttaaaaagataattaccatgagtcatagagctacaatgacatcaagagtttcctatatgaaacgaagtctctggtgggtttttggtacagtctttgcacctggatcagtggagtgaaatgtcatcacacttgaaaaaaaaattacttaacagacctattaagaatctttagaagtttgcattttgtcagggatttgtggtccaagagttagtactacagaacaggctcttttctagacctagggaaaccagtttgtttctctgctactgacgtgcaagacttactataggtgtttccttctcctgtctgttttgaagagacttcctctgggaattaatggtagaatacttgtgactcctgagagcagagaatgttccagggcatcatcatcttctccctctgtgctgtacatggcctccctttgtctctcctgcctggcatacctccccagtcctcctccacctcagtcacagggtgactgccttgctttctgtctacctttcccaactcttcaggctctcatcctggtggatcccattctgtagccccttctgctcttttcaggggcttctatttggtcttatacacttgtgtcatttagttacccacctattccctcagtggactcccattctgggcttcctgcagagggctcgtaagttcacctttatatccccagggtcagagctgatgttctgccgagtgaatggggaagcaccagaaagaacagaagctaatgatggactggcttgaccatggctcccacactttcaatactcattcctctgtttcctcagaaattttgcttgaattaatcttgtagctctccttctgaactgctgagcaaatatttggacactttttgaggagccctctttttttgtttttttttttttgagatggggtctcactctgtctcccaggctggagtgcagtggcacaatctcgtctcactgcagcctccgcctcctgggttcaagcgattctcctgcctcagcctcctgagtagctgggattataggcttatgccaccacgtccggctaattttttgtatttttggaagagatggggttttgccatgttggctaggctggtctcgaactcctgacctcagatgatccacctgcctcggcctcccaaagtgctgtaattacaggcatgagccactgtacccggccagaggagccctcattgatagcaagaataaaaacattttgtcaggaaatttaataataatcataagcccagattgagcgcttgctatgtgccaaacactgttctaggtgctttacgtgcatttcttcatttaatcttcacagtgtcctgaattaggtgctttatttaattatttccacttgccagtgaagaagcagaagtagtaagagggtaagcaacttgcctgaagttaaaagctagtcagtcggggacttagggtttgtagccaggcagttgtggtcttcggggaggggacataacatttttcccctcctgaaactccatattcctttgtaaatcttttctgtgttacatattttcttgtccctagtttagttatttaggtcagctgcttgtgcttctactgcaaaatgttgctgtcaatttccttgacctggtaactgcctggtgaggttcgccacggctgccagtcaatttagcaggtcacccgagtacctgtgggagggtgaggatgtggaatcctcaggagagggctctgctgttggctgctgtctccacttaaagtggacagttttgaatgtcttaataaaatcaaatcagatgttcttgagtattcattcattttattttcctaagcaaaatgttttgtaaaatgctgcttttatgtggctagagcaaataaatatctctattaacacttttaggcaaaggttgagatctttgagtgggttttaaaaatttatttttattttttatttattttaagttctgggatacatgcacagaacgtgcgggtttgttacataggtggaatgagtgggttttttaagtcgtcattgcgtgcctttagtctcactggtttgccttagtttctttactctctagactgctgtgctgacttttcatagctctgacttttcagtccagtgactttttgatgctctggccaggtggctcttgtttcagcttcactgggagggagttgtggaatctggctgacaattccatttagtcttcttgaatttaattggcctcttcccctttccgattccaagtaggggaatagcctgaagccattttcgaggggctactaaagcagtttacaagctgatgctttatatttaaataccacagtatttacaaaactgtttctattatgtatattgtctattgtagcattctcacagtgaccctgtggtgtgaacacagtgactattatcccagtttacacatgagaaaacctagtctgagagtgtgtgcctttccttacttagggcattgtggcaaataaagggagaagtcaagctactgcttccattccagtctctgaattccacgtcccctgcccccttttctttccagggcatgtatgatgtctcaagcttgagtaacctctaattgaaaatctgtaggtacttatcttctgcacttttgaaatgatatgaacgtgaaatattttcaacatgctaacatttttccaggccattattagggtattaaatcatcccgttaccataactgcaattttagatgttctgttgctaaactgggatctgtcaatagaatgcaatcttttgaaagtcttaaaaaatagggtacatcttggactcaagaattgtgatatcaaaataagacccttgactatttctggagtgtgctagccaatctacctggtggttttctttctctggaattggtgaagaaagagataaacaagatccaaaaccaggccgcatgaaagaatcaacactcttctggacatacagttgtttgggataattgtaaatcctactgtctatggtgactgacaaggggagaagagcagaatcctagcactccggctactgactgtgaaactggtgtatctttgctgtgacatatttagcatttaccttttactttaaaccaaaaacaccttttacacttttcttagttgagctttttaaaaacattgtaatttatgaaaacaatttgaacatagacgaaagtagagaatagtagtagattctcctggacttattactcagccttgacaatcatcagctcgtgccagtcttgtttcatctttacgccttttcattctctgctccttgctgtaatattctgaagcaaatctcaggcatattatttcatccctcaatatttcagtatttttttcagataagttctttcagaaatatattttcttctaatttaaaacaaaaagtttttgggaaaaatagaggcatttttgctgcaaaaatgggtcaggattatgcagtttctaactaatcggcatttttcaagttgattggttttggctgacaaaattttttttcatatatgtggaaaaaattattcacagtaacaaatgcatgttttgatagtgctaaaaattagtctatttttcagacttaattattcaattaaaaataagacacttcataaactttaaaactattgtgtagaaacgtactgttcttcagttttatgtgttttcaatcattatatttcccagctatttcaaacaggctaaatatagtataccttaagcttactcaatcattagtttagactcaactaatttggaattttcattgagttggatataactttaatagcaggtttccattcaagcaaagtatttgctaattgctggtgattattaaggcgaagtcttaaggttttatagaataagtaaatggttttatgggctcatgtatctttaggtatatatatatttatgcactttaatgctatgaatttagcctgacttggaaaaactaacctggtttatatgtgtttatagtcaattaattgattcattaaaatttttattttgttaaaaatattgaaataaaatcagagttaatttttattcattttcggtgaagagtcttacgaaaggtggtcagacttagaagtcagattgtggctaatgaatcttagtttttctctcaaatgtctcaagacagcatggaggcttgttgtcacatacactcaaaggaacaaaatacttactagctaagaaagggtatgcaatttttttagggctttgaagcatattgtaggccttagtaataataacagcgaatatttacatagcgagcatgtccatataaagtcatttactcattaccatcgtcctatgaggataggtgttgtatttatccttgttttatagatagaaactgagacatggagagtgaagtaactggctccagtcccagtgctaagtggtcgagccagggtcagaattgtagcagttgaattctagagtcctggcccttaacaactctgctagagtgcctcctttggtggataacgtgaaatactagtcgttcctatgttggaaactcatccttcgttttcttcaatgaaaatatggcattttatagcagtgctgtccaatagaattgttgaaattatggaaatacctgtgttatctagtatgtgtatgcccagtagtcacacgtggctgttgagcactcaaatgtggctagtgtgactgagaaacagaattcaaggttttatttaattttcagtaatttaaatttaaatagtcacatgtagctagtggttctagtattggacagcgaggctatagagtttgagagacctaggagaatttgtagtttgcatttcatggggtaatgataacatcttggcatttcgtggctatcagtatcttgacctcgttagggttgtcaatgaatggttgtatcattaaatagtaataatgttaataaaggtgaaatttttacaaagtggataatcgaatgtttaaaactataatgcctaacaacacaatcctgtttgatcaccaacatgggaaattgacagtctaccgcatctggaggcatcctcttgttaattccttcctagctaagtaaaaactgctatgacattgccgtatgattttcagccttgtagacgagttcttgctttgtaaagagtccagcttcttggtcaagcttaacattaggagtggtgataagatagtaaaatgacttggccaggcgcggtggctcatgcctgtaatctcagcactttgggaggctgaggcgggcggatcacgaggtcaggagatcgagaccatcctggctaacacgatgaaaccctgtctctactaaaaataaaaaaaaaaaaataaccgggcgtggtggcaagtgcctgtggtcccagctactggggaggctgaggcaggagaatggcgtgaacctgggaggcggagcttgcggtgagccgagatagcgccactgcactccagcctgggcgacagagcgaatcgaggcgccgtctcaacaaacaaacaaacaaacaaacaaaaaagatagtaaaatggactttgtgggccaaaagcagccattaagaagcgagtgtttagctatttatctttctcttacagcctcatgttgacagagctcccatatatgaaaatacatcaagaaaactcagtggtaatgaagctaggtttcatttcaaatgaaactgagaccacataaactgtgacactgatgcctcttataatgtgctttcgtctaagcctttatgaagcactgaagtctaattattttaattttttctttatgttgatgaaaagggccggagtggttgttcccaccagccatggtggggctctgaaatggaagcaagcaaagcctccagatggtggcaggtattggaccatagccaccctgcagacataattaaacatgtctgctgtcctctcatttagcagttctaaaactgacattttctttgtttatgggattgaactgttattgttagcatttatgtgaagggcttgcagtactatagccaggtgctgtttctcagctactgtgttaaacactgggcctggaactctgctttgaaaggtttggagagaaggtgcctcccaacattgagaatgagcatggtggtggggtgtttccagcaggtcctgtttgcccactttccattggtaattctcaagtgtagcagttcgaatgtagagacagagtgtgaaagtggattgggattttaagacaaaaaatattgaagagcaggtgaaacatacttcattcctggctgcagtaccagcttccgtttgaagttaggtaaatcatttagttgctgtggactttgactttcttcacttggcaaaacaacctttgggaggggaaaccaaatatcactagaaagtgatttgacttcttgaaaacaaaattacggtttatttgtgaaatgaaaggtagttgtgatgagtgagttcccattttctgtatctgcctcattgccaataaactttccatttacacttttaatgatgattcaaagagcaggtcagcattatgtaaaggcatttttgatgaattagtctcatgcaggtccctatatggtatattctgtagttaactgttttcattgaagctttagaactgactctaccttgtaatgggtgcatgattctgtagcataagtaagtttactaaccgactttgctttatttcctcttcactgagaaactctcattattttaatgaaagaaaatggaaacacttttctcttgtgctttttctcccctgatcccttcccccaccacatgacccttaagaaatgttctccttttggaagccaggtcatctgaatttaggaggatgttgagctgcatcttcaagaaagggatgcatcacaggatgaggactgtggaggaaaactttctctgagtaagaccttgcaaaacatggattgaaatataattgtctgcaaatgaattgacaagtgttggaccccatttttccaggcacttgattgaaaggctgcttctagcctgagggaggtcttgatacagttgatgatacactgaggctacgttattgcctgtgaccactgtgagtgccactgaggtgaccctcttgtgtgcaagtagctgtggttccacaattccgccgggctagtattcagacctaattctctgcttacagatgctgtgaattctgtaactcagaaatgacacccatatatgtgtgctcacaaacatcaaatcagctggtgcacagatacatagagcagccatgtatcaaggacttagaatgactgctgatcctcgaactcttttttaaaaaggtaaaattagcacaaggttaaaaccttaaagacatcagagtagttctgcttaacagcaacctgttacttcatgcctttgcatgtcagcaacttgtcctaaagtcagcgagatttcttgcttgtaactatagaatcttgtcttttggctgtagagcgtgatttcatggtggaggatgttgcagatatcttggtttgctattttatagcatgggttatactttaagggctgaaaaaaataaggtaatttaagcctgttttgagacacacagaaaggaagctgtttcataactatcagtcatgtgaaatttggcaggcccctagcccgttagtggccacagtcacatgattgattaccggttggggacccacagttagcttattgcagaactccatctggcataattgatgttgtcatccagtgtcaaactatccactctgttctgccaacttccttccaataacaaaactttcttgccttgcacgagtgaaagcctgtgtgatcgtgtgtttagaattacagagttttaaacataatccaatcacaagtatttgaacttcttgattttaatacatttgtacctatgttgccaaaaacctttttttccttgtctttgtgtcttctaaaacattgaaggaagaggtctttaatgcttccttaatacttttatcatgtttgaagtcctgagctctataaataatatagtccttattatctttttatcctgataatttataaaactgactgtccaaagatatgtatggtacttgtagttttatatcaaagaattttaaatgccaagaaccagggaagccatctaattctccgttctagctagtgctgagacctactggacaacatcttgacacttggtcactggcctgtgctagaggcatgatattctagtcctggttcggcctctgcccaccagtttggttttagatctcttcatttttgtgattaatgatatgaaaaagtgggatcaagaggtcacttaggtttccttcagtttttgatttctatatgaagatacagaaatatccactacatgtcaacaacaacaaaaatggaaatttactgattccttctaaaagctgaatgctccttgtcagtggatattgacccttcaacttttagaaggaatcagttaattttttttttgttgtaacatgtctcatttttatattgagcctaaattggcatggacagagataggctttctataacactatttttctacatatttttgagtggggcacacattgagaaacatgttttacattgtagcccagtaaacacatacatacacaacacacacacacacatttatatacatataactgaatcaaaagtttcacaaatcagtacttgcctttttcctttgtgatgcaattctattcgattttatttaaaagaatgccagtcagtgacccactaaattgattatgtgacccaagaatgggtcctgacctggagttcaaaaaaacactactccatagcaacctagaacacatttgtttcttctttcacatgataaccctgtaaactcaactatggttagcttgtttgcctttagtcctcttttacaggcttaaggtcccagtttctaaagctttttcttttgtgatttgatattttgactcatcaccgtactggtcaattgttcctggatacttatggtttgtatccctcttaagctaccagaagaaacgtaatctcaaaataaaatttaactagggcagggtctttcttttatatcatttcctactaatgtcattgtattacacatttgttctacaaatgtttgttctttataggtggactgagcactactgtgtgttagggctatccttggtgcttgaggacactgcggtgagcaaaacaaaaatgtctgcatttagagagtgtacattgtagagaattgcactagccgctaggagtatggcaatgtcaaatgaaatacccaagcgctcagtcatagagcttcctcggtagtgctcagttgcacgtgatcttttagggcaccatgttattgtaggctgtcaggcatttactctcttcattgtgagttcctcctgcctttccacttgagtgcacatcttgccaaagatgaaatgtcagtttctgagaaaggcacctatgtgttgtttcctttattatttttaatttttttaaaaaacagagtggaaattatagacttaaaatgataaaaatacagaaatatgaagttatttttcctgaggttcagactggttaaaggaagattgaaagtttccattgtatgtgataaaggcatgtgaattctagtcaggtcacagggcatcaagaggggtctttaactctttgggaacataaagtacactttttaaataaaattataacttttcctggagtgattttgtcatgggtaaatttgggccaaggttaatggttttagaggttgaatgacttatgtttgttttatgtaaagtaatagggcaagagatttgaatgaacaaaataaacaaaagatagggtctctatcttcaaagcttgcattttagttagaaaacaaaatctgcataatgaaattatataaatgagtgatcaaatcacataataaatacaacttgaaaatgatgagaggtaagtagaattaatcaagaaagaataactggaggtccagcatttgaaatagataggaataaattggttaaaaaaaatgtttataataagttgaatgtaatttaaggaatctgaagcactgaaaatctgtgcttaggtgaagttgcagtttatttaccttttaaaaagtagtctgattttttttccttttgttgtttgaaaatttacaaattaggaatttgtcataggagatgtaaatatatttcgaacatgagaaaactaatgtctagataatgaaagggcatgggaaggaagccttaaacatgacattattcagtcagaataggattgcattgatccaggggtgtgaaaatcattatggagtggtgttttcacacaggcctcttcctttactttattctgaactacataaatatcaattaaagctttctagtccaagttagcagatggcgatttatgtcggacttataaacaaagccccacaacattactacacttaattgatgaatgcgctctcccttccctgaacaaagattttggcctccagtgtggttgtctgagagaaaattaatgaattcttttctgtgatctcatgtagaaaggctcccgttatagaaatatttgactttttccccccaaaaaagaaaacttgaatacttttaagttgcctagtaatttaagttcccaaaggtggactggaatagtatttggtattacatttacctaaaaaattatatttttggcttacagcggaatgatgcctcaaaacaaaaaatagtaaccaaaataaaacacacagaaaagtggaatgtgtttaattattataactttaggtagacatccaaattagagctcatattttgttatttttaattacttgtatttgttattatttttttttttgtgatggagtctccctctgtcatccagtctagagtataggggctgatctcggctcaatgcaacctccatcccctgggatcaagcgattctcctgcctctgccttccaaatagctgggattacaggctcccgccaccatggccggctaatttttgtacttttagtagagatgggttttgccatgttggccaggctggttttgaactcctgacctcaggtgatccacttgccttggcctcccaaattgctgggattacaggcatgagccactgtgcccagccagagcttatattttaaactctttttctgtgaattcttttccttagacttgttctttaaggtgagatgacactttgtactaattcttaaaatgaacccttcccccaatttgaaatatgtgaaaatagctgttttgtaatatggacctgcaaatagtatcttgtggtttgggggctgtcgcaatgtcaacctccagtggaatgtaggtcgctgcatcagaagaaggtagaggagccagggactgcagaatgtattcctttccttttgtttgaaaatagtaaagttcatttgtgaaaaaaacctgccttgtcttttcatactagcttctttgaaatgagcagtaggctgattgggggtagatatttatatatactgaaacattaaggttgatgtagatgagaaaacagtggtgctttcgttgagggcaatctgcactaaacactttgactttaatgataactttctgcccgctgccacccaggcgtctttcttgtgctcattggtttgagggtgcattcctcaaataagaggggcaattcaggtgaaagttttcaatgttcctgcccaaggcagccttctaaaggaagttctcttggtgatgaccatcacatgattgccacgggaatgtgtttactacacgatctgttgatacaggtaataaagaacacgctgatgacttttccccacgaaatctctgaggtcggtcttttagtaacctttgagataatcatttaattcacgcctcatagaaattatgtgtgcagtagggccttggtagagattgacatttatataaggtcagtattggttgacctagtttgatctggccctagatttataaatgaatgaatgatctccccagaattaggaagacatgacaacaaaattatgaattcatcattacttaagtactgcaaaagtcatgctcttaaactatagcatgttagagttgagacaaggcctcagtatcttctgtcctcggctggttggaggaaaaaaaataaatgtgttttaagtctcaggaacctgtgtggtcctcatgcttgttaaatccagaatgggtctctccctttctccaaagatgaagtttggccttggggggattctgtgttgggagctgcagtaccagatgctcctgctagtttaatagaagagatcaggaagaacaaactggcgagtaaattggacagatacagacacaaaagacttcagataattggaaagaaattttgcaatcagggcatttctgccaccaaagcagaggtatcttgggattattcttgtgctggctgttgttgaggtcttacgttagcactggggatggaagataattcctgtatagccataatatgggcaagtcaccagtatcctttaagatgacaaaattcaagttctaataaagacaggatttgggacattttttaaagagaggtgctgggtgtggagagggaggaagtctggtttctgataagtactcctcctcattttacaagtctctgcctgtcgtgagagaagtattattcctggaaatgaaaagcatggaggcagaaaatccgttgctttaaaaacagatagtggatttttgcactgctggcctagctgttgatctgtcagtcttggtaactgaaaccctgtctatgaggctgtgtaacatctcagatgctcagcttcaaatctgagatcacaaacagggtcctaaaacaaaaagtttgttaaatgcccagtcaagaaaatggagctacggaaaaacgcaaaacagaaaaataaggtttgccttacaaagtgttcatacttcattcttagacctagttgctaatgacattcagttacctgaattataaaataaaggggtactacccagtttcattaattgccttgtatccagggctttgaaaggagattggatatttcattaattgatttttgaaattgagtgtggtcctgctattaaccatgtcttgggagttcccacccttgaagttgaaggcatcctctgaagcttagaattttttttctttttttcttttttttttttttttttttttaagagacggagtctcactgtgtcactgaggctggggtgcggtggcatgatcctagctcactgcaaccttgaactcctgggctcaagtgatccttctgcctcagcctcccaagtagctaggactataagtacgtactaccatgcctggctaattaaattttttttttttcctagagacgaagggtcttgctatattgcccaggctggtcttgaactcctggtctcaggcaattttcctgcctcagcctcccacagtgttgggattacaggtgtgaggcactgtcccaggccggaatctttgaatttttgactctagtcttgaagggatggaacctgcccttctagtgttgtttcactttgggataaagcccgaaggctcagagctcacctgtaatctggtggtggtagactgatgtgtccatcctgggttcaaagttgatgtttatttagtaaaaacctgccaggcctcagaggggagttagactgtgaatctcctctctgtgtctattaagggcacctcatgtgtttcatgtaaaatccttgtagggtagattctctgttggaatgcaactgttagattgtttcaagggttggactcattttccttatagtaacttacttaggaattcatacaagttaagggcttcagctgcttacattgtttccctttgtttggaaatagttaatgcactcttaaaaactgattgaccatcagggtgtcattctagtctaagattttagtttaacagtagatatatagcgattgaaagttgtgatgtattaactctgttttccctaagattcatctattcagttgacttttttatcccagtactctcttcgggattgatcataggtattaattggcactagcagtttacagatgtaagaactgagagttcgattaccttttggattctcccacttagcaactacagaaatttgcttctgtcttactttacttctctaatcatcactgttttcttcattaatcagaaatgtaaccgtggtgtgggtggcgtttcttttgtctcagtagctctctgatttttgttctctttgtttttctttacagagcacaaaacttattgacatgagtctggaattttgaagtaagggcagtcatgctaatattgtgattttccatatttgtgctttgcatgtaaagtgactttttaacttttaatttttaattattatgggtacataatagttttatataaagtgactctattatgagttttacgttttacaggataaaaccttaagacttaatttcatacatacatttcaaaatagggcatcaacttgatagaaaagttttctttttccttaagtcaataatatgctgaataaacttttgaatgcagaaaataaaattctgaacagtattataaattagaagatcaaatggctatgttggtaaggttagtaacaggtgacagatttggtattcacacctatttgtcactagtcatgtcttttgacagttattcttcagagcaattagattagcgcattacgctttcggttttaagaaatgtgcttcaaagtgaaaggtagttaatgcttacctaattgctaaaaagagctgttatttcttttaaggaaaataatttcctcttgttttatattatccgggcgcaatggctgagtgaaattaattgttaacttgaaacacatttattttctatggatgtgaatattcccagggtacatttgacactttgataatacttaattgtggattaggttcacaattctgcgtgatatgttgagatgcaagtcaggggagcctcttacatttataaaagttcaattaaaagaaactcatcattaagatggcaggaaataaggatatagttttggcatttgaattcttttgtgtatatgaattattttcttcatcactctcataaattaatgtggaggtctgaccagtatatatttttataaacattttttcctgtccccaactaatgcgaataaactgagctttattcctgcctgacccagtcgtttactttctatggataaatagtattccttgttattttcaaggctgatgtaacaacacagctgctggatgcttggcatttctgcttctggtgaaatgctatttgtgcagatttatctgatccagatgtgtgaccagcaagctacatttctaattataaggacagccaaattccattataagcacatcatgggattatagggccgggagtcatcctgagaggacatctagttcattctccagccgttcagcaggagcacacttcgtaacctactccagcactgaacgaagcagcaaagaatgttccacacatgtataggctgaacgtggaatcactggaattgtaactggaaaaagagacaagtccctctggtctggccctcttgctttgtgggtaaacagattcaggcccagagaagtttgacttaatgtggatttttatgactctttgcctagaacttagtcttcttttctctgaagtcagtgctgagggagtgcaagggtagaaaactggattggaaatgccagtttcacatccagatgtagctctctactcatttagaagtaagaggtaatgaattagtgaaagctagattccgttgaagtttattaaacatttctgaaacccagtatggagcgtgatatttcatgtctgtatgtatgtttgtgtgctttagtgataaagtacagaagaaactaggcatgctgttaggtttagaatgtttgcaaatgtggtgtgtaagcttaccaagaacaacatctcagaataaataagtgattatttaacttgatttgatgttgttgactctgggttttgattttacattacttcaagtgatagttagcctgccacagtttcatggatgttgggagaagacaaggggttcctgtaccacagaaaaacaactgtattactcctgacataccaaatagtgtaaactgttgtgcctagaacttactggcatgcctatgttggttcatccttgcccccatgtcccataggggtgataaggatggagcgtgcagatggagctgcacacactttgggtttgcgttgctgctgaggaacactaaactcgtagaatccgctgcttttatagcatgcagtaaatgaacttgctctttgttccaagggggaagatattacctcatttgtctgttcaggttgctcactgcaaacataactttgagaaacggccttgatacaaaatggcaggatatgtagaagcatgagagacctatggaggggtatctcacaatgatcatgtcctgtaattacgacaatcaaataaaacacttcactagcaacttcacagagaatacaagacatcaggtagttggtaggaagcaaattcataataaaaatggtaagtgctgaataattagagtgaagatgggtggaaaatatgaagaacttgatttcttctgtatattgacatcttcttagacttcaggatgtagtcagattataataaaaaacacacactaaaatcaggaattataaatcttgtttctacactgttaaatctattgatctttttgtgaaatgaaagtatagtagccatgtggacccaggcataggtttagttctgtttcttaactgcattgtgactttagtttattttttgttttaattatgaaagttatttatattcttagtaaaaaattgtttttcagacaatagagaggtataaaaaagtaagagcctctcctagaggtcatggaggttgccacagttctgtagcctttggattagtcaacatcagaatggaagggaaaaaatgattttagtggctacttgttactttggaaggatcaaagtgcttgggacatttacaaagtatgctgggctgggtgctgtagctcatgtctttaatcccagcagcttgggaggccaaggtgggaagattgcttgaggccaggagtttgagaccaggctgggcaatgttgcaaaaccccatctctacaaaaaagtaaaattagctgggagtggtggtgcacgcttgtagtcccagctatttgggaggcagaggtgggaggatcacctgagcctgggaggtcaaggctgtggtgagctgtgatggtgccactgcactccagcctgggtgacagtgagaacttgtctcaaaaaaaaaaaaaaaaaaaaaaaaatacacacacacacacacacacacacacacacacacacacacacgtatattctgaatctctggaaagatttatgaggcagtattatgcttctaccattaaaacagtgttattttcacttttgttcactcaaatatttagctaatggttgtcctcaacataagttggggctacatagatcaggtaacagtatctttattttatggataaggaaatggagacattcaaagtcaatttgtccagttacatggtttggccatgttcggcttcttatctccttagaaaagattttggccccaaataaaactttcataaggtaggggacgatgtagttagtgctcctgatttcaattactctgttctgttttttaaaatactatgtatcattttcttgcatactacataatttacttatattcattgtttctttccccttacgagaatgtaaacttaatgagaacaagaatttttgcctttctttttttgtcttgggcactggtgaagtttcagtttctggaacagcatattaatccatagtaggtgctccagctccgtagtaaatttggtgatgaaatgaatcaacgtgtggtaaatatgtggtgctacaaggagatgaaatcatctctttgatcttagattatgttttcaactttgagcaagtagtgggacatctttggatgatactgcttgcctcatttgatttgatcaatgagattgaatttgtaaagttgggcttcaggatatggcctacagattttttttgcatttggttttgtacagtgttttaaagactttgtttgcaagcaacatttaagaactcagggatttcatgtaaaataagatttctagcttttttggtttgtttgttttgttttttttctttagaaactgaaagatctggcaacacggcctgcattcctgcatggtagtgagggtctcgaactaaatagcagctcacttgttaagaaagggcatttgctctctagtttaccagtccccctgactgtctgttgactcttgatactgaagctgggttgtcagttgctttttgccatcttttacattctttaatttttaaatatgaagaaatattcagccatatttttcaaaaggaaataaaaaaggaaaggttgaccacttcactcatcgacactccatggctcttgttaggcaattgaaacttgcagctccttgatgtgattatctaagacttctgcttctttgaggtctagactttttatgattacagttatgattgctgatggtatgcagaagagaagagatagcaattcaaaggaattaacctcagtgctttgactgtggaagtggtaacatggaatgtgagtctggggaaaagtgcttcctttgttgaactattaatgcataatggattccgatgttaaaagtgcatggccacattgcttgtttcttagctacacattggaagggccctatgggtgtatatatagtctattccagagagtttttatttttctgtttgtaaaggtggcagaaattgcagaagatttaaaaaatattatttgtaaaaagtgatctttcatccaggagaaatgaatgcttgagatttgttgtctaagacctaaacaattaagctcggggccaggcgtggtggttcacacctgtacgcccagcactttgggaggctgaggcaggaggatcacttgaggccagaagtttgagactggcctgggcaacataatgagtgacgtctctacaataaattgaaaattagctgggtatggtggcagacacctgtattcccagctccctgggaggctaaggtaggaggtttgcttgacctcgggaggtagaggctgcagtgagccatgatcctgccactgcacttcagcctggacgacagagcaagacctggtctttaaaaaaaaataaagtgaaaatctctggattccttttaatataaagaacaaatggtatatgcttccaagggcacgttggaaaattggcaatttcaagccatgtttaatgtgtttaacgtattttgttattatatggataaattaaattgtacaattagtcctttagactcatgaattgcctatttgattatgtgactctttatgtaaaaactgggctgagttcttatttaaaggaactatgtaagtgaaatgctaataacatttcttattttcatataatctttataaaattgggatttcacataatctcattaggagagttgaattaagttgttagaacagagttatccaaaaggcattctctagtgaacattagatcttaaaaatttgtgtgttcagaaacgttcggtcttggggagattctcagtgtatattactaaaagttctttgaagtgtagtgttaaagaatttctaactcttcagctcagagtttctcaagcttgatagaagttttctacagaagatgtattagcatgtagcagagtatttttcctatgtcacataccttagaaattttcacctggatagatttattaaaaaacagacaccacatgtagtgagttcctggcttcatgtggtttctcgcttttcctcacctttaccagagtttatagttccatttctcccaggccactgctggagatggaaggaagctgcatgctcaaaacagtgtagattccaaacagaatgagaaggataattttgagtcatctttcttttgtttagaaaataaatataccttttttgaaaataattgatttcctatttttaggtaatgtacttctagttaaggcacataacttaccttgcctgtattctaaactatcatcttgatggaagccatctttttctcctgctgttggtcttttagagacctgctgttattcacatggataatacttgttttctctgtgagccgtagtacttgccaggtttgggacttctcacatagaggctaatataatagggaaagacagtgggataattaacattttggaatttgataagtaagagtgagtgcatatgtgtgtgggcgttaaaagagcttataacttggttagatttcatttctaaacttaggtggaaaatatgcttagaaatttgaagtgatttgagaagcaagagaccttatcctgccattaatcagtggtgtaacctctgaaaaataagggatgaaatagataatctcagaggtgctgctgattaaaaaacttttttttttcaaatttcattgcaaattttaaatcctgatgttgcatttttaaaacttgtataggttgtaacatgctggaaatgaaatcaaaccctcactggggaaaaaattaatgctgatgtaaaaatatgatttggaatctttggtatttgccaggggctataagaatgaaatggttctccatttgtgatctttctgtagcacgtgaaggctgatggagaatttgagagccctagctctagatctccaagtaattggagatctctaaataattagaaatctgcaagagcatatagtccacattagcaagaaatgagaatgtaccactttggttcatggatcttgaagcttttatcattcatcacctcagccattcggttttttcagagtaagtaatatacttagaaccaggaaattgcttgccacatcttgttcctggaaaagctgacagcctaaaaatgcttatcattcaaggtgtgacctaaatgagtgttgtacagctattgtaatttttctgtaaagttatgtggctaaacaaggtactttctagggaaaatttcttcaagtaggcctttatttatgactttcatcccaaattagcaaaactgctgtactggtaccacagaatttcatattagaagggaatttgcaggtagtctagtccaacctttttatgttgcaaataaatgtagactgagaaacctaacccatgcagctagcatacgtaacagaactgaaacccagatctccagatggccaccgcggtcatctttcctcagtatcatgtgcgtttcagtcagtgtctctagtgctagaatgaatcccttgtaaaatgtgttttaaattaaatgtaatatccatatatcaaatcacacaaatctgtaccttcgtaattatattttgaaatgcaattgatctgctgaatataaatgtttgaaatgttttgtacatagctattacatttctttaaactgtattttgtaggatgtatatttcagtgacaatacacatcctacaaaagagaatggtttcataaattaattgatttaaaagtaggtgccagtgttacacttttttataaataaaaagataaattttatgtagtgaaatctaaaaaaaaaaaacaaactgcaattgatcgtttaaaaactacattttaaataaattctacaaaaggtagccattatgattgtatgattatttgtgttgatggtactctcctgtggaatgtgtgatgcttaaaatgattagcttgtgcaaaagctataaaaatagtaatagttttactcatgtatctaactgtcagactttaaaatttacaaagaatagccaaataatattcagggttgtgttttaagtgataagttagctttctatgagacaaaaaaggcattgacaagagcactgacttgtcatggtattgaatttcacagaattagttttggataaatgggattttcaatgtcctgtgagctctcaaaattcatagtgagcaactaatacccacaggacaaagtaaaatttagttcagcacaaattgttaattatttaatttgcaaagtaaaattatttaatttgcaaagtaaaagtaaaaattagttcatcacaaattattattattactttactaattcttgtttccgaattaaatatttgaatcaagaatgtaggaaaacatcttttaaaatgtgtgttataggagtacaatataaaactaggggcaagatattttaccataggattttcttaaaccctagaaaaaacagtaagaattcattaggggtgaggaaatttccttagtgaatgttggaaacaggataaaatgtggcacagctgtccgcagaggtttggaggatttccgtgggaagatcagtactgagtcctcagttgatcgaaggtaggggacagcactacacataccatgcgcaaatcgaatgtagggtgtattaagccctcaggagtatgaagattttaaattactgggtgggtacaaaagtaattgtggtttttgccattaatataatttcagtcatagcactatcttaatatctctgatagaagcctcttagaacattaaaacaatcaagattctaataaggctgtcttgtgaagatcaaggacatggaggtttgaaaatctcagtgtcgattcattatttaaaaatctgttgaatagctcaattacaaagtcagccataagtggaaaactatatatccagggtctgcacagtgccagctgcataagataccaagtaaatgtttgaacaactgagggaatgaattctcaggtcggccatctcaactttttatgacgttaatgacaaatatgatttccacatagataattcatttgtatcagtgttttgggtgtgatatctgtcagttgtgatggctgttatatgagttgaacagttgtgcttaatcctaatatcttaattgttagatgttgctttaaaatttttaaaattagtcaattctgaatttccagatattaacattatctctgaaatgttgagtgaattagaagtggaagccagagacttttgtctctccaacttctccaacttcagatgtgcctcctcttttctgttactgtcgttcctcagaaaacttgagcaggtgggtcctccgtgcttttttctaaccagtggatggcaaatatgtgacgtgcatctcccgtctccttaatcccatgaccttgacagccatctctaattatcactgagtgagggctgtgaatctttctcaactctgcactcgaggcaggcaccaaagtcagctggagtgggcatatgagaagaaacctagggctgtgacataaaacaaaacaaacaacaaaaaagaaaggtagggagctggagaaggacttgtgcttaggaacacagaaatagttcttggtgggaacaggataatccaagtttcctgcctctccagagcagtactctttatcactttacttgctcatggagtgggataggattgtgaaaatgaactgaaatggtaccctttcggttttttcctagtacttcggatccagctcacaaaactaaattattctttaccttgtgtgatctgggtgctgaagagaatacagatggagcatctgcaatttgaaaatccaaaatgctccaagatctgaaactttttgatgacaggatgccacagtggaaaattccacacccaacctcatgtgactggttgcagccaaaactttgtttcatgtacaatattatttaaaatactgtataaaattatcttcaggttatgtgtataagggtgtatgtgaaacagaaatttcatgtttagacttgggtcccatccccaagatacctgtatatgatacctcgtattatgtatatgcagatattctaaaatctagagttcagatctgaaatctgaaacacctagggtcccaagcatttcaggtgaggaatactgaacctatgtaactacttttcatcccagtactttcttcattgcctatgaagagtttgggaaataagtaaaacaaggatgggcttggggaagtggtggagagaaggagtagaatataataaaactattctgaagtacttgggaaaatattttttaagtagtaattgttacagatataagtatgtcttatctgttaaatacagcagggaggatttccacctggcagtgctgttgaaagttttagctgtatttaaatttcttgttgcaaatgcttcttttcatacatttaggggggccctttttctccaattaatttaaattaccaaggtttcgctctatctatataattttaaaatgtgaaaagaggcagtacatgtggaagaaaaggtaggtattttctcttaatttgcagatatatgaaaaaatatgattaggaattatagaagtcagaattttgaaagtagattgacggatgagcgttgtagtatcaagcactttgtagtttcctagtgttctgaaaagtgtgtgtgtatatactgtgtgtgtttgtgtatgtgtgtatgcatgcatgtttgtgtatgtttgctttggagcatcttaattttagctttatgaagtaactttgtcactacagttgctaaaacatataagaatacatattcttttaacagaatacatctgttaaatatgctgcaaaaattatcttcttcaaaagtggcttttatttgtaggaagtacctcttcacatacattttcatatggaatttgtatttactcatcttgatgagtactcactaaagagaaatggtcaaaattgtgtagcttctagtaatattacagtgccctgactttttactggggggggtgtgtgtgtgtgttagggaggtgagggggttggggagtgctctaacggatggctttagattgcctcaaataagattgtaaatttgattatgagtcagttatctgttcatttcatgaccatgcacggggcctttaaccttaagtttctctcaaatgctgtcataaagtcatcattactgatagaaaaaacaatgcacatttcaagtgtttacgatagtggttgatagtatcaccttggagtagaagaaagcaaacctcgtatgtcaaacagagcagcacagaatgccaggtccccatgcaaaagctctgtatggatacctcagcaaacctggagatccaggaagagattcaagctaaaggattgactttttgaggatcggttaaggagtgcatcaaatgcctgaggccctgtcatttgctggactcgaccttgtgttaggtatacattttctgagccttaacaaaaagattcttctttaagttatttagcttccccacacattaagtgggggagaaaattgctcaatacacattattgtatggatataaaacatggactgtatggaggaaaggctgtttgcctggagtctttcttgagtctctctcagagaggctcatgatttcaggtaagggagaaagtctagtcgttacccagtccatcatcttcctttcatgcatgaggataggaagaccccaagggttctcctatcctcattgtgagaattgttattgtgacccatagtaatcttgatgtagctttaagtagcaagacctagacagaactgtgggtgttctggaaaagaggagagagtagcaagagcaaaagctcagcaacggtctctgtgctccccagcatcaggacactggtcacatgggagggttgtgtagggcagagtaggaaatacattagatttttttgttttgttttgtttatacagtgtctcactctattgcccaggctggagtgcagtggcatgataatggctcactgcaacctctgtctcctgggctcaagtgattctcccacctcagcctcctgagtagctgagactacaggtgtgcaccaccacacctgactgcttttttattttttgtagagatggtgcctttctatgttgtccaggctggtctcgatctactggactcaagcgatcctcccaccttggcctcccaaagtgctgggattacaggcatgagccaccacgcctggccagaatctttttttgagacaggattgttgctctgttgcccagggtgaagtgcagtggcataatcatagcttactacatccttgaactcctgggctcaaatgatcctctcacctcggtatccccaccacacctagctaatttttaaatattttagagagagagtctcttgctgtgttgcccaggctggtctcgaattccaggcctcaggctgtcctccctcttcagcctcccaaagtgctgggattacaggcatgagccactgcacctggatggaaatacactggtatagcctttaaggttcagaaaagatcaaaggcagtgttaactttagtgtactcaggaatctcctggagaacttagtgaaaaggcacatcacctgctctttctgttcgaagggaggatatctaggcctcccttcagagattctggtttagtagatctaagtgagaattgagggatctggatttttaaacagctttattgagagatatttcacatgtcatacagctcatgcatttaaggtgtaaaatttaatgtttttagcatattcatggtgttgtgcaaccaccaccactagcaaattctagaacatcggcagtgtgcaaccaccaccactagcaacttctagaacatttttgtcccttctaaaagaaacctgatagccattggcagtcgcttcccaccgtcaactccagccccaagcaaccaccagtctactttctgtctctaaacatttgcctattctggacttttcatataaagagaatcgtacattatgtggccttctctaactggccttttccactttgcataatattttcagggctcatctatgttgtagtatgtatcagtattttattcctttttaaggaatgtatccattctatgcatccataaaatgggttcatttttgtgtgtccattcttctgttggatggtttctcctttttgagctgagtaatgctgctgtgaatatttgtgaggaatctgcgtttttaaacaagcacctcacttgattctgttgctgatagttcctgcacgtatctggagaaactctaacctgaatggttagtgttgtagaatgactcccctacaatgctaagtcctctgttccccatctcttatgggtgcttctgcttgaagaatcactggtctatgagcgagtgtgtagtggcttagtgaaagtgaggttccagaactaaattacatggtctgcatgtgcaggttagagtggacagaagggagatgacagggacagtaggcagggtaaatgggtcctgtactttttcagaatctaaaagtgacttgattattcctgaactagggtgctgctgctggtggtgatgatggaaaggaagggtcagaggtaacagactttatcaaaagaatactctcttcagtaatggtgattttaaaatactcagcaatttttgtttttcctcgactcagacacagttctgtctaattcccaccttatctattcctatcatcctgttgttccaaataaatgtatttttaccaactgtttgagagaggaaatcctgggataattagctgaaggatacagtgtaataaaaaaaaataccaagttttgatattttgaagcctctgatctactagggatagatagagtacaagcctgagttagagctgaacttctcgaagttctttttcagacttgggattctgtgatatattctgaaactaaaaatagcttctaggagattgacagtccccaccaccactgcccattggtgccactgggcctagagtgaagggcctagaacagcttacatttttcctgagagctatagcacagcttttagaagagagactgtcatagccagtgacccatatcaggtactcatagagaggggttttgtttaataggattacccttgactagatatgcatgatctgtttcacatttttctgttagattatttgacacagatgtgatcaggttgcccttaagatgctctttgttctgtgtactatttttcccctctcctaatacaagcatcattaaaaaaatcttggagcattgataaatgaaaagattcttctttctacctactttatcaaaatcactatgaacactttggtgtatgttcttctagactcttttctttgtggaaaaaaaaacaacatatacctagttttgcagagtatcacagtgtatacttccttgttaacctgttatttccccctacagtgtgttgtgagcaccttcctatgttagcagattgatttctacagcatttacagttggctgcagtcttgtgttgtgtggataaaatagcttccaacttttcactatttcagactgtgatgtatgttttcatacattgttctaaaatatcttaagccacatcttgccagtctggttctctgttaattttactggtaacaatccaacctagatgctcagggttaagtattctggggcaaagtgcccttgaacttcgttgctggtacatacattcattctgctcattggttgggataggtttatggttgtgaaataggtgctacagacagttaacataaaacatcctgtagctctcagaagatagagaatacaccctttaactttcagaaacttgcgtacatgtaaacgtagaaataaggaattgcatttttattaattcatggaatccagacttcataatgggtttaaataattctgtttaaaatatgtgcacacaatctaaaagcattttgtcattgtaacctcatatcatataaaaagaaattgtgcttctgagtggccaatggacatacctgttgtatcatctgtttttctggtttattcccatctttctgccagagtccaggacgtcagaggagaattttgccatcttctctgaagtaaaatgtgatttaggaaccaacttgcttattttttaaagtaatgagtattattgttatgtatcaaaaaaaaataggcagattgattataatctgtagctctctaactgtaaatttcaaatagaaaagcaagattgagaggaaatatatcatcattttaacagtggctatttttgagtagtgagattatgaacaattaaactttcttcttgcttttctgtattttcagatttctagagtgaacatgtattatacgctataatgcataggaatgtgggaaagaaaatatgggccaattatttttaaaaggtatgggatgagggcgggtgggctggaaagaactcataaagataagagtgggtagttacttttccactgttaaagattgaggcttgccagctcctagggaaatctccggccccaccctgtacttttcaagcaagagcttttgaagtcttttgtgctagttagagactagcatagttagtagagctaagtaagtatgtaacagattctattattaggtttatctttgctgattcccatttgattgacagagagttctccacccagaaagtttgatttgttttggcagttggaagaggattttatggagcacttgttatctaaaaaaagtaaggctgtggaacctgcttcccccaccccctcttttttagctgtttgggttggtcctagtgagcatgcctaatcttgggattactcagcaagcatgaccttagggctggtcttgtaaatgttaccaaatctattacttaaccacagatgttcttccattgttgtgtcccacagccagagttgaatggtgatgattagttctgtgagacttgggtaaaacctgtcttctttaggtctttttgtatgtggtggtttgaaagtatttcctcacaaaagtttaaacaatcacatggtgcaaaagtaaatagaattacatgatttttaaaaaaagttaacttgtatcgttatacaaattatagatgctcattgtagaatattttttaaaatgtccccagttcaaaagaaaaatataatttatttgttataatgttatatataggttaagcattaacattttggttccatttcatttcagtcttttaaaaaattctgtgtacatatataatctgactgtgtaacttgcactaagcattgtattgtgaacatttcctcatagtctggtttattttttctatgttgtaaaagcgacttcctgacactagtaaatggtattatttatgatgggcatgggtacacatatcttttattttacagctgctgccttaagtagaattccaataaacccatgagatgtatgtattactcgtgatattctttattattatgcccaaattgatagattagtagaactggcaggagcattggtcatggaattcagtcctttaatttgagaaatgatcctttgagctagagctgcaggaatttttttttttttaaagaaatgagaaaaataagccagaagagttgccctttgcccgatattattaaattatttaatggccttgagataatcactgttggtagcagctgcctcctttcttgtccaggttgggaagttgggttattgagaatttaattaacacatttttttaaagaaccacgttgtacttcgttacatactcaagtatggaggaaaaagtcaaactgaggctagtagtttagtattgaattgccaaaatctatgtattaatttcatttttcattcaccagttgatttgatggcatgtgtaagcagtcaccattgtcttgatttcctgcatgtacctgtacagaagtcattgttaacgtgatactactgacagtacatgcttttctagttgaggagttaatgtaataattttttggctttgcagttaaacacagtggtcggtatttaaggtatttaaggaactggtatttaaggaatcagtggagtcatgaagtaatatttgaggtttgattttttaaaaattgcacattaaatattaacacctttcagttggctttgaaaaaaacagtagatacttgggagtactttgcagaatatttgagaaaaacaattacggcttagttttttttttttttttttttttttaaagaaaaccaaagcaatagcctgagagattatctagaaaaatgaaatggaattgttgagtttccctttcaccttgggaagaactcgggggaatggttgtgaacaacactggctttgttgaccctgaagtgtaggcagttagggcctgtgaacatggcatttatagtggtccaccgtccttgctgccttggaaaattctttctggaatggcagaggtgctctttgcaaggcgtgcttcctgtgtgagtacctattgtggagtcctcggttgaatgggaggtttgtgagaagtggtttcccaccagcacacaatgctgcctctcggcaatgtaaatacacattccactcagggtcaggctaacagtgactggctagagcaaacgcctttgcaaagaaagatattttggagttccatttatttatagcggccagtggaaaattaatatgcttgttaaatctatttttaaaaatgaaagggaagtctctcatctaactgtttgctgaatgcaaatcaattagctgtggcatattttcattttgctaatttgttgctctaggaaatgaatttcaatgtcctactaattcctttgtctatatttgaaacttgaggttctcattttaaaagttctctttatgcctcggaagactacttttgggttctttgatgaaaggcataaataaatgaatgaccctagaaaatactggatcaaatcatggcgggacttaaaatgggctcattgagcagtaaatgaaggtctagagatcagagcagataggattcttccttgagaatggcaatacaatattatttgtcgttacttccttagtgtttgatcatttgctttgtatctggggcatgagtctgattacaggaaagattggacgggaatccccatctaacaggcctggattcacgagtgccaagtccctacctccactgtactctgctgacagccccagcaggaagtacctggcccccaacatcagttttcttagccctccagcctacttttctgctctcatgatttaccaaatgaatttgcctcacaaatgttctgtaatgagtgtggcataaagtcctggagagagacatctgtgatagaattagaatacctcttaatttggattaactggttcttccttcagaccctgtcaggtgaactgtagttgtataatagaaagtgtaaaggagggacagcaatctgtttttttacgtttttacatataacttgtttgtgtggagcagcaactctcaaaatgtcgtctgggggacccttgggtactcataagaccctcttgagggttcatgacatcaaagccattaataatcctaaaatgttacttgcatttttcattctcctgcttctttgagtttaccggtgacattaactgaaaaatattttatgtgtgtcttttgtgttcatcatataaggagtactaaaattgaattggagaacatgccttttgtaccaaagctgaaatttaaaaagatttttctggaaaaattaaaaaacccattaatgaattccttaatttagcatttgcataacttcaacacaaaagagtgtcttgcacagaggaaaacctaaataggtatttcttaaataaatgggtgtagctgcctactttttcttaacaaattgtattagtataaattaatgtcattgttcacaggcagtgtttggaacataggcaaagcaccatgctttcaaacactaaaattcacctatttgtgtataagccatatatataccaattatcattcttatctattaattaaaacaaatctccttaattctctggtgtgcgacatctgtcgaaagaaaatattttctctagagaattttgcatttttatgttttcaaaacgtttatctgaattagtaatgtgactgtatacatattttatattaaaattttatcataatgagctaatctgaaatggtaaataggtactcccttacacggtgtgtctttgcacctgctaatttgtttctttgttaactgttgtcatttcatgtgaaacatgaaatgtttcggtctcttctgagctctaagtagcacctggtatttgctttatgttcagtcacattaagtgaaaaacaaaactgcttatgagaatgtcattaaatgtaatatttctcaagaaataacttgcctttaggaaatacaaaacagttctaaactgattttcagtgtttcagacagtgttcttattgatttccgtccccccaaccatgcaggagtgagaatcagataattttttgaaaaaaatatttgaaccaatatctacaatggcttatgtcagaaatccttgaaatatatatttaagtataaataggaactgtcagtgatgtttaatggtacaggttcttttccttataatgaatgttttataacatctattcaattaagcaaaactgagtgtgtcaaataaacatgattgaattctatacgagatgattaaagaaaaaattttagtattctcctggctgatcagaaatgaaggttaaggcatggggtatgttttgaaggcaaattcaccttctgtaacacctgtcagatttcaaagtctagaaaagaggccacagctgggaaaccaaatttagatattggggcttatctcagatgaaaggtttcgtagagcatggaggtctgttgactttgcatggtatttcgtcagaagtgtccaatgcggattcgtttttagttaatcgagtataacatttcattgtaatgccatttaaccttatgcctttatttctagaactctagaattctagtacagtgccaccataaagtgggtacacagtaaatatctggttaacacaatggttgattaccttttttcaagttcttttgtttgatgtcattttataaggtacttttcagctaagtccttcgtttggaatattgttattattaaagggagaaaccttcaacctgctttatacttattttacagtagttacttaaaactaatagactcttgaaaccctttgtaccaaagatattactccagcagtctcctcatcaataacttctgcccttctttggagataattttgcttttgtgtttaatcacggcacatttcattaaaatcaccatggaagacataactttagcaatttataatttggtttctgctagttttttttttttttttcctcctctaattttaaaccatctaggctaaatggtagtgtaatagatttgcttaatcctccttaagctactttaaaatgtgctctaaaaattattaagtctgtattttggtaaggaagcaccaaaaactcaactgtagcctttgtggaggggaaccaagcactccttaggagggagatgtgctcttgtgggttgtctttgaaagttatcttttgataccttttctgttttgtaccatgtgcttgttttatctagtctttaaaactcactaacctatatataaattttaaccagctcttctacttgggttttgttgtcagattcttagatgttacagttagctcgctaagagcatggacttttaattttcactttctgagtctctttgttagccttagttgttacatttgtaaatggacaataccaactacttcataggatgttttgatgctaggtaagaattagtgtgcaggtgccccaaactgcctttgtcccagcagactgaaatagcagcttcagaactcttcctctacatctttccagaaagcaatcagttgtttggtgcttgcaacacatttttttttttcttctattcaagggggttatgcatgtctcttaggtgcccaaattgatgcacaaatgtgaatttgattcgtaacagatctctacaaatggaataataaaatacgttttggatcttattaaagggctatctggaagtcatgtgcttaagtagccgtatcattcatgttatacataaagaaactaagacacagagagcttatataggaaaatctgaaccacagtcctgaaaagcagggggacctgtcaaagtgctgtggggtgccaggcaggtatagtgcccaagggctgggcaagggctgggtaaagcgtgagcttctggcgcttgggagaaggagcatgtattctgacttcctgtctctttccacctccccatgcagattagaattagacttcctcaaggggctttagaagtgatgtttttcgctatctgactacagttctgtagagttttctctcactgtctattagaaacatacataaaatttcaaatttcactgaaaatgtgtattttcagttatcccatgtttggatgatgtgacaaggttagcttgggtatgtgtgagaataagggctcatagctttcgcatgtttccttgtagatacttgactgtcatcattgggatgtctgggtgtgagatgcattgtgatatgagtgtgcctggaatctaagtgttctaataaaaatggttaattacgtctgcaagcttatgtaaataccacttaaaaacaacgaacaaagcaaacgaacctttggttggtaaacttttttgtagataagccccctttcccttttagttaatatttgcaaaactgagctgttatttatgtgaggatgtggatctgaggtcaagagattgtgtatatatagtgatgtaatttttttccatttagtttttatgtttctgtaaagatttggggtatgttgggctgctatggaagcaacctctatattaatagggggttatggaagcagcctcaaattacatgtaatttttactcataacccttatatatgtggatttttctcccccagaagatactgctttcccgcacattagatttgaattcagacatgactctgctttgccacatttaaaattatgccaagacaaaaatgtttaaaaagcatccatggattcttgaaggcagggcctatgcattagggacatccatcccctttttgcacttaagagcacagtggatggttccttttggcttgttggttgaacctagtatttattttaatctggagtggtggtatttttaatctaaaaaaactcagtttcacaggatttctctgtggatttaaatgctcccaactaaatcttttatgcttataattggatgtaaaacgcaagaatgtttttaaggttaagaactttttcagacaactgtgattttacttcactaatgaacacatatcagacaagaaggcaaattccagactatttgtgcctcaaccaaccagctgggcacatacctccaggtactgctcatgtctcaagaggtttttctgcatgaacaatgatcaccactccttctttccttcaagtggcaagccatggcaagagtctttcttgcacagctgtatagaactcagctgtaaaattagattttattggcataaaaacacagtgattatcagcactgtgtgctcaatacattcttttctcaacattttacttagattcttcctttcatgcagaaggctcaagctgtacttaaatgagggaaacaggtttttagaagttttgtgtgtgtgtgtgtctttttttaagctttagtttaatcaatattaggtatgcatggtaagcagttggtattgaagggaggaaacatactcccttaagatcagaaaggaaccttaagggcatattacagatttataatattgtcattttataagagaggaaattaattgctgaacttcagagctgattatttttttgacaaatcccagattagcactcagattttctagtactcagtgctggtgcctgtccacgatagtgttttttatttatttatttattttaagctatttttagcagaggggctgtgaaaaattctaataacagttcttagtccctctccatatcctttttttttttgcgctacttaatttgattttttaagaagcaagggggaatgtttgcctgaagtgtacaggagggattagctcaaggaaaagcactaaaaccacccctaggtttctcctgtccaatggcagtgtcccacatcaggttcataatgaccacatgctaattccacatgggcagagccaatgccaaggcactgctgtggtgttactgggaagagaaggaaaagccatattctcacagtagcagggaagtggtcaaaacagtccggtgtgtgttgatgaatgagcagattccccagaatttcagaggtaaagaagatcacatagtgttctattttgttttaatgagattttttttctttcttttgacgctgttggtgtttccatagttattatcagaaagcagtttctggttttgctgaaaggctagaaatgacaactattttcagagtttctaggtcgtgaaacctcagtcaacctttcaaagccagcattgatcaggaaggaaagaggtttttctaatgaggaaaataaaacagtaaatgatactttgacattctattagttgtaagaatgtgtgcaactgactgtcttgctttgctctctctctccctcttttttctaagttttgctaataataaaacttaggaagtacacatttaggaagttgtctgtccttgtgactgatggcatttatacataaaggccacccatatggggggaggttcatgaatgcagtttttcttttcttttttctgtggtatatgattctgtatcaaattttaacttctctagatgtttgtttattttttttttactacagtcaaggcacaaaccaatgtaaatcagctgcacaaatgtttgtcataataaatttttattaggtttaggttttatattggaagccatttagaaactagtcttataatcattcataaaacattagctattttattgttttacaagagttatatagagtatagtaatttcttagtaacctcccaaacccctctttttccaaacacaatatagcaaagttgtattttctgtgattcaataagtcagattgcattttgagtattcatgtggtttcccccaccctgctgaatcagaaatattttgttcccattattattattattaaaaaaccaaaacacagacagggtttcgccatgttacacacgtgggtcttgaacttctgagctcaagcagtccccctgcctcggcctcccaaagtgctgggattaccatgcccgatcattccccttattactgttatacaaatggccaggatgttactctgctgtattttctgaaacttgacccaccatagattctcactattagaagtcagtgggtatttttagtagagaaggacattttcatgaattgagctgattttacctaatgtgtctgtgacaatatatttttcaggctacagaaaagcatgtagcagagcaaactgattatgtgttgttatgtttaaagtgtgtgaaggtgattggttaatctgtattggaaaagacactagctttatggagtacatggaatcatagttaactatagtggtatgaattctgatattattttcaagttgctttatgggtccttgtatttgatgggttttgaattggagtatggaagtaaaaagttaaaactgaacacagacattctacttatttgttatattactccatcaacctttttttttttttttttttaaaaaaaaaaaaaaaagagacaaggtcttgctatgttgcccaggctggactcaaactacctgggctgaagccatcatcttgcctcagcctcctgagcagctgggactacaggtgtgcaccaccatgcccagttttccattgactttttaaacactgctccaggatagtcaaagttagtgggaggcctcattagggtgctggtgaagtgagcctgggagcctcagcctggcttgtaattgaactcaggtaatcaactcctctcatccagcctggcccagcgggtttggttctgatgggtatactttgttccttttggaactgttacgtttctttttctcttgtcatttgaaattaatttgcgtactgtactgctaactcacatcttgaattaatgtaaggaaatttcagtcattggcccacagagtgaagaccaggacattttgttactaatttgaaggccagtttcacagacttaaaaactctcccagcagtaattagggctttggctttgttttaagttagacattcttcctagtatataattgctttggcctttgcaggtgggcctgcagttctcttctgcgaatcgctgtttttcgtgaatttggccagtatgtttcttagtataggctggaaccaaagtaccatggaaaatcttttttaacttggaaaagaggaagcaaaataagaaaaaggaataagctagttgcctagagaaatgcaaaaactgaagatcttttgtaatattcttttaaagtaaagtttctttaaaagctttggggacataattgggtggaattaaatgtcttactaatagtgaggatctgttcattctgtttccagagtgtcctgctccaaaccctgcatttgagctcaggggttgttggaaatgctgggtcttgctagaagttaatctcaagtgcccacgtggcagcctttccctgtcaatcaaaagaatagaactagctgggcgtgaagcacttgtggttttagtgttatgtgtggttagggggagaggttgtgagggcctgtggttattaccaaattctttgaaatggaagtatgggtacaaacaaaataaagaataggagagaaaccctggtgctctgtgaaggggaaagagaagtccataggattcgacaaataaatgccttgtagtagagatgatctagtttctgtttttttcttattagttttgcagtgcatttcttcatttgtaaagggtaattgatttcaagaatggattcattatcacatctctgtggtgtgttgggggacagtgtggatgtggtatagccttgaccaaaatgcctgagtcctgtgatagatttggccagctcagatacacatctgtctagggaagaaggaacccagaccaagaaaataagtgtttagtcagggtggtttctactgagcctttttgactgagatgaaaatgagttatagtgcagttaccgagagatcacacatctggcctgctcagctaccttcacagctgacaatcagctggtggtgaaaaggaagcctgcacaaagcacacagggaacttccgaaactgtattcagggactccttctctccgtgtgtgtatgtaactgacaatctggctgcccagcccaaagaaaatttaagacagcaaatttaggaaaaggcgctgagactggagggagtgtggttaatgaagaaaagagaaagaaaaaacattacaattcagcataagaacttattgggaggccgaggcgggtggatcacaaggtcaggagttctagactagcctggccaacatagtgaaaccctgtctctactaaaaatacaaaaaatagttgggcatggtggcacatgcttgtagtctcagctactcaggagtctgaggcaggagaatagcttgaacccaggaggcggagtttgtggtgagctgagatcacgccactgtactccatcctgggcaacagagcgagactctgtctcgataaaaacaaaacaaaaaacaaaaaacttaagtaggggtggggtgataatagctctgtatatgtaaggtcaaaatgtttccgtgacatcctaatccatcactttatgactgaacacattattcttataaactgtcctgaaatccctaataaaaaaatctatggccagcctgctctttaatgaagaacatgtgtaatttccattcagaatcattacaaacaaatagagtaagctttggttcttaaagttaactgtgtggctaaaagccttccacatccattgcttcctcttttaattccattgaaaagctttgtcggctcgcgtcaggtaggtattcccaaggtttcctcacagctgagttgagccaccctgttgagagttaagtccatgtgtagttttgtctcagttactggttaaaactgaggaggttcacttttgggttgctgtcaccatggagtgatgactgctcatgacaagccttcccaggcctcctggccctacctaacctgctttaactgttgatggttttgcagtgtggtttccccagttcacaacctgaatctgtgactttctattaggaacactcactacgtttcccttttcatgcctggggaataaccagaaagatactgctgtgaagcctaagttttatgctttcatgcttttatacttttcctccttgccttgtctctagtctattttctatggagcatggactaagttgtttctattctatgatcactttaagggacagcttgacaggcagttgccttttaagtagctgggcagttccttgcctcgaaataattcatttctttctatgtctcttgcattctaggcaaataaaagtattctctgtgtgtgcatggagcatagaaatggggatttaaacattgttggctgcatgtaggccccatctaactgaatctgttaccttatattcttgtcaggaaagtctggtttatctggtgaaactgttggggattacaaagaaggccttggattctagcaagctggtggctgagggagaagatcagcaacgttggttatggctgagtgagactggtggggttcacagtggcctttattcattcactttattaattctcctgttttcgccatggttaatggtgtgactgttgggtggagttgaagcttaggagtgtatgatattcatatgttcccactgtatctctctcaggagtgtttgtacatacagcttccctgtttccccttcctccacttccctcccagtcatttctggtaacgactgaacactgtatgggtggaaagtccatcatgtagtagagcaaaattttcaggcatctcacctaaagttgcctatgacgttttcagaagcaaatataacgatctccttgtgccagtggacttctttggtttcttttgggggtaaaatcccttatgaaaagagatggttttgcacatctgtgtcagtccccatactcttctatcctacttctgtaaggcctttgtaggcctgggtctgtgggatccatctaccttatcccacacttgcagaacctggagttaatgccctgcttaggactgacacgtgtgctgtttagcgggcttggattgctatgtctcattgacagcagtcctgttaactaacacaatgcctaccagaaggttagaattgttagtgttagatgtgttgttggtgttgagacattcttcggtactagagacaggagaccagggatgcctaaattttgtaccagatcacaactgtcttctcagtccaacctccccactcccccacaggactcacacaagaaacaatgagaaataggaatgaaatagcaccattaattggatatgagctgcaaatccaagtgttaaaaactttggttagatgggttggaccacatggagtataaagagcttcaccccaaagcaggtcctaaggaccctcatctccctcctcccatttcaactctctaaacctgtatcattatttactgtacactggcctaatagaaggacccatggaggctgaaaggacctagggggaggccctgaaatgggtttactcctgttgccttgttggataagagagaagagcttctatccttagttagactcacctgtgagatgtcagaaccatgccaagcgggagagagctttggcactcactaatgtagcagaggggatgcagaggagacacagagccacagtctgcaccacagcctcaatagcgagtgcccaaggaggggggaagaagaggtgaaagtgcttctccactcttagatgcttatactcagaccccttaatgtaaattactgccctgttaatccaacctgccatttcgaagaaacattaaatgagacatcatacttagcactttgggaggccgaggcaggtggatcacctgaggtcatgtcaggagttcaagaccggcctggccaacatggcaaaaccctgtctctactaaaaatacgaaaattagctgggcagagtgtcacgcgcctgtaatcccagctacttaggaggctgaggcaggagaatcgcttgaacctgggaggtggaggttgcagtgaactgagatcatgccactgcactccagcctgggcaacacagtgagactccatttaaaaaaaaaaaaaaagaaaagataggcctgtgtagtgtcaccaagttgagaaaatagccatttttctctcatgcattattagtaagataaagaatattaggaatgaaattgaaatagacattagatttcttctccatcatttgacctattcatagttcaaacaattaagtcatgatgatgtcaacggggactatcttagttttaattgtaaaagaatctgttttctttcatgaggataaactatcagactttgggcttggtacttttatttgcttaggaactgagtaattgcctcataaaacagcatgatggtactattaacaccgaattataaggcctgttattatagaatttgcttttctggttgggataagacttctttttttgttgcttaaaacaattcgtttctccaaatgggtgtataataaacaggtaaaattttgcctatttaaaataaaaaagtttataatctcttgggtggcttttatatatcttttgatacttccaagagacggctttttttgggtgggatggaaggaggagacatatatttaacatttagagtggaggtatttaagaatgagaataagtattttatttctgtcatatctacctgagacatatttgaggcaattgtttaaaaatttgccccattattttgtctgatttgaatattaggaattaaagggttcattgaccaaacgtccttgaatttgaaattttggggactctattatgaatgataaatttaactgtgggctatatggcaattgttcctcagatcatttaaaattgtgtgagagtgtctgtgtgtatttatatttgttcgtttctcctttgtccatctttgccatatattttaggcataattgaagaatatgtaaacacttcttaaggaataagttataattgtaaataggaatttactgttattttccttctattgtattgcaaagctaaatgacggtggcaaataccattatgggatgaaagtaggctttgtgttattttgaaaatgtgtatgaatttcattggaataaatggaataaacagaatagaaacaatggaatctacctttaagcctgactgcacaagtttccctggatatatctgagatacaggcaagttatgttcacatggccacttagagattctggtcttttgtctcctagttgaggctatttctttgcctttgttctacccctctttggggcctgacatagtaatacagggctctcagattagaataacttaggtttcatgatggagcacttagattgctgacttgttatgttacaggtgatttttgtggtcctgagtacttttttaaaagtggtggttctcttgcaggaagccagctgagggaagttctccatgaatgtacgtcacaatgatgatgaccgaccaaatccctctggaactgccaccattgctgaacggagaggtagccatgatgccccacttggtgaatggagatgcagctcagcaggttggtgtaggaagaggggaatttaagtcaaattgtctaagtgggaaacagtaacgcagtatttgatttactttgggattcaaagatttgtgatttcaaaccttagcatttctagaggtaagtgtttttgttgtagaattactgtatctttttttttaaatattgtgattttagagaacaaaatcttccctcattcagtttgtattcttgaaacattgaaaagtggatgacttctgaagtgagccattttcagatagtgtacaggtctttgaaataaaatggctgtttattcatgccatgttgtgcttgacgagtttgcttggttggtcagagctgcgtgctcagaggatcaggttttggcttcacagaggagtgatctcggcaagacgcgcaggacactgtgaacccacccttgctcctggaattagtccttccaaatgtgtagctcacaaaaatcatggtacttttttccctctaaatctcctttgtcactagttactgaacattgtggaatagagagttatttgtgaactcgagaagttatttgtgagctcagtcaggtagcacttgggggaaacaatttagacagtaagtgaaactttaaaaaattattaggaattgaactattacctctaatgttaattaaaaatttttattacaacagttgggcttgctcagttttataactaaatagatattttatctttgtaccttcttcagaagcataaaagcaaatttttattttgtgaaaagtagaattgggagcaagtgcttggaaaatatttacccaaaatatattcataattcaaataagttaatcatttatttggtgtcagtgcatgccccctgctctaatatatcatatagtgtattcatactctatcaatcattgtatattaattctttgtatatacctttgttggagctgaccttgctgcttaataatttatattattttctcctgcattgcactatgaacctcttaagaacaaaaaatgtataataggtgctcagtaaatgtttgttagttgaatgcatttcatgccttctcaccactgatgcagacatctcccttcctgattcctcaatctcttcctctgctggattacttccagcaacgtacagtagtatcttacctctccccacccagtaaaacaaaacctcctcacttgattccacatccccctccagttgctacctcctgtccccttttccctctttggcagtatttctccacttcctctccttccttaccgcccattcctcactttacagtcttcactctgtgttctcatcttcctcttcagtctttagcgtgtcctgttgactttatctcaggagtgtgtgctgaatccatcctctgccgtatccacttcatttccactaccattgctggaccctgcgccatcatctcactagggtagggtaggacagctcttttcacaggtctctctgctttactttttgccccaccaggaagcattctccacatagatcctgaggtttatttccaaataaaaactttctgatgtcattagcctacctcaggccaccttctcacacctggagtgaaatccaatcacgctgcctggctgccagccttccttgttagtgctggcctgcctctctgtcattctctgcctgctctcctgctcactgtgctgcattagttcacgggaaggttacggagtgttgtggatggtttcaagatgcagtgcttggtctcccaattaaaagaattactaatacaaagaaaaaaaagacaaggtatttagtcaaatgtgagtaaacttgggaaacaacttaggtctctcagatgtggtcacctcattcccatttgcctgtgtagccgagagacctgaggccacccatccatgttgtacaccatgtttatgttttgatgatttcttccacatgtctgtgatttagcttgccctgcatatcttacctcaactctaagcagaagctgcttaacaattttggttaataaaatcatactttcaaagctggataaggtggtccatgcctgtaatcctagctactcaggaggctgaagtaggagaatcccttgagcccaggagtttgagaccagcctgggcaacatagtgagaccccatctctaaaaagaaaaaaaaaaactcacatttttattaaatctttctttaattaatcttattaaaactttctctaaagctaataagaaaagaagaatctgttaatgtatctgttttataaatggtcaaaataatcaagctttatgaaaaagtggggttacacttaaaaaaatctcagaagaagaaactatttgtctttttaattgtgtttaattgtgttaaatatgtttaattgtgttagaagcattaacatccttggctccaagctgttacttggcattaactctaacttttctgtaatgggcaaaattgttaagtaggtaaagtgcgttagaaatgtccctctcagcaggaccatcccaagatttaccatgttttgtcattgcctctatgtcactgaggctaagcctaggcagtggcctctgtgcctgatatttttcttcctcattctgctcccagagtctccatcctgtgtctccctcattctttcaagcctccgttctttcctttgggttttaacatttagcattggcctaagtgggcattggcagagccttggggcctgtgtgttgaacccaggtgaaggcacaaggggaagacagagtgagggagaaggaaaaaccaaaagtggcagagaaacacaagaggaagtagggaaaggggagggatagacggcaattcaaaagaacaaagaacagaggtgagtctccaagacaggatcccagaatgtggggctgcatgagttttgagtgcttgctctgggcacctgctgatatttgctgcttgcccttaagagcctgcgtagtgtagtgctcaggtggttccatgttaaaggatcaggctacagcggacataccagagaaagggatctgtacgaatgttttctgaggcttttactgtgctttctcactgaagcaacaccttttcatcttaagaagaaccttttggaggcacaggattgactctaggggtggacattgcaggcgctatataacagacccttggcggtggcatcctgaggtatgtggcacctcagtcacctctcacatcatactgttgtaaagagccatcccctggccatagggttctgcctctaaatgtctgttaggagtgtgtatggtgaagcttaccttgtatgtgtttacagggttcttaatactttgcagctgtgcaaaggacattctaaacatttctatatatgcaaaagaactaccgcagttatgagaaagctcttcagttctcacagccctcctccttctgatttctgttctgctggtttctggatgtaattaggactagttcttggcaggattctctgttgctttatggctctccaaataagacacactgttaattttcatcatttgaagtcacattaggttggaaaccttggtttgtcattttatgcaggtagcaggaaaagggcagtagtgaaaaggatgattcttttcttaaaaagaaaagtcatcctcattatgaatgaaacttttaaaagcgttatcaactaaaaatgaataacaagaaacaatgtgaacagaagcagcttacacaagagttttccttatttaacagctttatgaggtgtaattcacacgtcataccattcacccactgaaagtatacgatcattggaatctagtatattcacagaattgtacaagcttgactaaaattaattttagaacatttttatcactctaaaaagaaccctggagagatcactccctatttcctattttctctctcccttccccctatcctaagtaaccactaattcacttactttctgtttctgtaggtagatattgcctattctggaatttcatataaataaaattacataacatttggtcttttgtgtctgtcatctttcacccaacatctttttttttttgagacggagtctcgctctgttgcccaggctggagtgcaatggcacgatctccgctcactgcaacctccacctcccagttcaagcgattctcctgtctcagcctcctgagtagctgggattacaggcatgtgccaccacccctggctaatttttgtatttttagtagagatggggtttcaccatcttgggcaggatggtcttgaactcctgacctcaagtgatccacctgccttggcttcccaaagtgctgggattacatgtgtgagccaccttgcccagttcactcaacacatttctaaggttcattcatattatagcatgtgacagtactgtattccttttttattgccaaatattttactgcatggatctaccacattttagtaatccactcgtgatctgattgatatctgagttattttcactttttggctattatgagtaatgctgctatgcacagattcttgtgtggacatgtttttgtttctcttgtatatataaccaaaagtgatattgagtagctttattttgaagtattattttctaaataaagttatctctgctttttatcactattaatttcttccacctctgagtaactacagcctagcttagctaaataaagtttgcttcccttaatatgcctaattgtatactattcttgagttatacaaatcaggtttcaacctgagtttttaatgtgtggctatataaatgatgatgagtgccattcaataatcagaaaattgatggctttgttgacatattcagaagctagtggtatattaacttacctgtgtttgttatggacttctgcattttagtgattttaaaatgtagcagccagttttgagcacaaaagaataaacatcagcccaaattctgactttctttattgctttaatattttaataatttctgaagaattatagcagctaccagttaaaccattagattgaaaacagaagtgctgacacagggtggcagagtttactgatttgttaatttaacatgtgacacttacaagatataagggtatctgtgacctgcatgagagtagtgtgccactttatattatattcttagtgactttgcttaaatatgtattcactgagggtcaattcctagtggaactggattggattagatgcctctttgacctgactagcatttagcatatggagcacatctagtatatgatttgtcatactattcttcttccttcttgcctcttttaattcatctattcttctagaatattgctgagtgtttttaatgcttcttcttcagaaagtagaactccttaaacacatacagaaaacccgcctctcctgctagctcaggataacgtctcatctacttaccctggaaggcagaaggcaattgcctcaatcatgtccaattctcttgactttgcctattcctgttgatcagcacttagcatgtcatttcatggagagagttttttcccctcttttgtttcttcttttgaaagcccttgtttcctctagacagaatatgtaaccagagttttttcctagagcgttcttttgaatacacatttccagatagtacgttcaacatattaaagctttccaccctcagatggtgctcatcatcggcatgtcttttatatcaaatgtgcccctcctcgtaatccagtgaccttttctgttctggttgatatcttcttaataaccttctccttgatggcttccttcttgcattgagtagttcaaatcctgtcaccgcacaggtttactccttaaatatactgagagccacggtgtcaggggcccatgaagagttttgcttacatgacagagtttgtctcctcctcagaaatcccaacagaaaggaaggtttgtcatcagtatattgtagaaaaatgaataaacaactcttggggagattacccaggagaaagaaggatattcagatgagaatgggagtgacagttaagaaagagactgcagctattattgctaaataacattatagaagagctccttttgtggtagaatcctgttgtgggctgaggcttgagctagaaagtagaaagaggctggtcaaatgttgggtatggaaaaccaagtatggggaagctcggccttggatcacattcttcagcatcaagatgcatgagaaatgcacaagctgggcaaatgcttaaataaaattattattgctgactaccattcatgtttcctctaccactcaaacttataaagccctccagtgtcaagatactgtcagcttctctcctttgaaattggggtggaaaagaatgagaggataagatttatgactaaatttaggagtgattgaataatagatttgttcattttaataagtatttatcaaatgtcttgtatgccagcactgtattaggtgctggcgacagaaagatgaataaggcactgttcttgccctaaaggaatgagcagtctagttgaggagcaaaatatggcctaccaaaaaaaaaaagagactgtatttacatacattgagtcacaggagagtgcttggattgtagagtgtcacagtgcgtaggagttcagaggaggaattgaggactgggataggtgggcaggaaaacagaccaggctaggaaaagtatctgtggggaggctgaaaacctgggtcagatcagatttaaaatgaagtgaaggctagaatgatccagactttgtacatcaagtaatccgtttctgttttattaaaggagaatacattatagggattacatacgcaatggagagctattaggggtactacaaacaaaccttatctgcatagtcggtgatctctttgcttgaacttttgctatttagtgtctttgttagtgagtatatttgtcctctgattctccagtctggcggtccacccttccgcttgatgcctgttgctcagaattaccgactccacagtggggcagatcacaagcacccctcaaccagatccactttccagctgcggaggcagcaacccctgctttgagggcctccttttaactacaaaaaaaaggtgtgattttatccagatctgcggtctgacttttcagacctctctaagttagttttgccaattttgctcactacaaaagcttccaaaaaggcatagcctatgcagaatctcagtcttataaaggaaaatgttgatgccatgttatcagagggtgttgttatatgtggcacccccaataattagaacataggacatataattatggcagccctgagctgtctgggttgagagacacttcagaatttaattagccaaaggcaataataataagatataagatgtagtcagtatccttcaaatgctagaaattgagctgcctttccaacaggaaggattaaggtaaaatactggcatgttagcgttgcattgcagaataatggcaattttaaattctaaggtgattttaatgttatgattgttttcaaattattgcaatttttggctgtctgatttccttgtcaactcagggtgggtagggactgtgtctctcttgttcatgctgtgcctggcatctgaagtaacattcagtaagtctttttgaatggatgaaggatgaaagcaatgaacagatttaattcatctatatcagggcttgaaaactagcttattgcctttgtcatacaggcatgggtgtacgtgtctgtgtgttgtttttgttttacctttagtttaaaagaaaaggatttcagtaccaatattaaaaatgggaagatttatataaaactctggatttttctgtttatctggaaaaaccagaagacatatgcctgtaatcccgactcttttgggaggccgaggtgggaggatcacctgaggtccagagttcaggaccagtctgaccaacatggtgaaaccccatctcaactaagtacaaaaaattggccaggcgtggtgctgcatgcctgtagtcccagcaactcgggaggctgaggcaggagaatcacttgaacccaggaggtggaggttgcagtgagctgagattacgccattgcactctaccctgggcaacaagaatgaaactctgtctcaaacaaaacaaaacaaaacaagaaacagaagatgtgataacactgggctggtccttcctacctggcaacaattgacacagaagttgcagccatttgctgttgatggggaatgtcctcttcagtgcctattctgtccacttagtttccaagcctgcctgaactctgtggtcatcctggtttggaatctggaaattcttaactttttaaactttaaattgcatcttgtgctcatgcataccatattttaaacacagaaaaatgattaagattttttttcaagcacatgcattatttatcaaactgataatgtgttttagaatcttttagttgtctacttgccccatgacttgtaaaatgaattaggctgggcgctggttcatgtggctttgtagaaggatttcaactttacctcttacatgttaggacccatgtgagtttttgtgttttgttttttggctttgagtttttaggatttgaggcccccaataagtgccacatggaacatttactaaagcctagaaaggccaaaagaaacaatcctatcccgtagttttactgtttacagtctagttaggagacattaaacacagatgcaaggtaaaagtattccaagcgcagagatgcaaatacttgtgtttatattcttttttacagtttccaagaattgagtctttaagtatttattgaaagagttttttttttttttttaaagggtaaacttttcctggtattacctagatgaggaatttttatttaaagcatttatgtatgtatgtaggtatgcattggagacagggtctccttatgttgcccaggctggtcttgaactcctgggctcagatgatcctcctgccatggctttccaaagtgctgggattacaggtgtgagccactgtgcccagtcgtaaagcatttccatattaactttaaaaaaaataagattaaattggatagatttccaaactctgatttctctttttcttgttttgaaaatgtcatgttgaatgtgatgtgatagctattgatgtatctcatagtacagtaaaagtagtatataaacacaggaggaaaagatgagacacttctgcatccagaatatgtttgcacataatcgttttcatgtaggcagactcttttctgttttagtccaaatgattgatttaaacatatgactatataaaatatatgcgttacactccaaacatgacagtagtaagcaagctgcgtaaaattcgtaacattaatctccaagttccaaatgcagatactcattctcgttctttttttctctctcctacatttccaaatgcaaaaataaacagcctgccaaggagcaagttgctaaagtgctgtagtgttttatctaggtaatcttgggtttagctgcctttagattatatttgtttcctcatttaaattggcattggccacaactaggtgcctcttggtcattttctggtcagctttaatgttacaataacttgaagctagacatggtgcgtccccagaagaaacaatatacacgtgctgctttagtgtgaatgcctacattggtatttcttccctgccctgggcctttttccttaacaggtgactgtcagatcagatcatctgttgagagggaatgtgttttacctgagctgcaggtgtgttcagcacttggattaacaagaataatttggccctcccttcctgggtgtcctctctttcctgccccttccctgctctttgcagcatagtagacaagcatttgaataaaatggacaatctgcatttagcaaattacccttccaaaggcttctgttttgcaaataattgggcagttaagtggagacaggaaagatccagaggtaaatgtggtctagttttgggtgcaggttgactacaaagtatgtcagaaaacttgttactaaggttccatttcggctgtttaaaaaaatacaaatcaattcttgttagccacaccttagatttgaagggaaatggacttgtgttattgaccaattatattacatggcttttaattttcaggaagggtcattaatatgttttgtttttgagactcactttgttccccaggctgtagtacagtgatacagtcccagctcactgcagcctcaatcttctgggctcaagctattctcccacctcagccttctgagtagctgggactgcaggcgtgtaccagcatggcctggctacttacttttattttttgtagagacagtccccctatgttgcccaagctggtctcaaactcctggttttaagccatcgtcctgcctagacctcccaaaatgtgggattacacaggtgtgaccctctgtgccaggccttaaccaaaccttttctttttgttgttgttgttatattcatgcactcagaagttgataatttttttttttttgagctggggtctcatcctttcacccaggctggaatacagtaaaatgtttttgtgttttctaagcagtggttagaaacattaatcactgagcatgttactgtctcagaagtttctttggtctttatattggagtgctgagttgtcattctagttcatgggagaagctatgacatacagaaggatgtgctttaattagcgatgttgtttggtagttaaataggccacagtaatgcagcgaatttttaatttttattttatattgccagaatggatctgtttagaacccatttaaactcttgtcaccttggcaaaaaggtcacatggaaaacatctttatagaatggtgatttctttataatttacttgatggctttagtcgtgactgaatgtaaaactataaaatattaatatgaattgcaaatgaatggcatccatatttttctcttagggtttgtgataggaaatcagatactgggtttatctatatggataatatctgtctgttttcaggacacagggaatcgatggtggagttgggtgttagaagacatcatcctttcatagatcggtgtccacatccaccttacttcccacagtctcttgctttctcatttttaaggtggtttactcaggatgagagttctcctactttttattgactacttctgcacactatgctactccaagcaatcttggaacttttttttttctctctagatgaagtcttgttctgtcctccaggctggagtgcaatggcgtgatctcagctcactgcaacatccgcctccctggttcaagcaattctcctgcctaagcctcccgagtagctgggattacaggcacccgctaccacgcccggcgaatttttaaatttttagtagagatgaagtttcaccacgttggccagtctggtctcagagtcccagcctcaagtgatctgcccgccttggcctcccaaagtgctgggatttcaggcatgagccaccacacctgggccaatcttggaactttaaagagcctccattaacaaggcagtaagataggtgtcacaccaggtgtgagtgccatctttagaggggtacagtgacccattttctaacagttattcttaaacctagagggaaatataggacaaaagatgctgtaaggttgactcttccagagatttccataccttagcaatctaaaaactgtacgaaaggtcagagttaggactttgaaagaatgctaagtgtttgacaaaatttttggcatttacctcagtcttaagtgctactttggaagcctgctgatcacgagaatgcttttagtctcagcccaatctcaacttctacttgagtggttatctgtggacactaagttaaaattgttggaaacagtggcttttaatggatatttttatctctttcttcctgctgaggtggagggaaggattagtgaccattggggagggcttgtgaggtgctggggctggtgctgagcacttacacacattatttcatccagtaattacacaccctgcaaggcggcaatcatctttatagacaaaacccgaggggagaaaggttacgtacttgtaactggcaaatcacagagctgggattcgaacccacgtatctctttttccaaaactcagatcctgccttctgggaaaggtggagctgcctgggttggacttacctctcagtcttgttcaggtaaacagctggggaaagagatgggactaggtttttgcacagtagtaaattgtaaagtttatagaggccgttcctcttcattatcttacatgatttccacattaactccagaaggtggcagtgcctctggctccccagcttctgaaaaattgaggactaaacagcagtggtagtgtcagaaggcctggaggtcaaaaggagttgggagtgaaatcttccgaagccccagcctgggtcacagcagcgtctcccttttttccttagggaatggttcttttcttgagattggcaataggagggctgctcccttgcgggtcagcagctgctgagagatgatggtggccagaaaagggtagtagagggtagtagtaggtagacatagtagaggtagtagagtttcctcccctgtgggattctcaccctggagttaggagagggccttttgcctgccttttcttcccaaaccccatccttcatttccgttaaaaaatgacatcaccctagaggcagctttgagactaaagaagtttaaaaccttgtaagatttgaacatattaagtgatttttcattctgaatttacagagtaataccaggataaaagaaacaaagtttatccttcaaaaggaaagaaaatgaccacaggtatttcttaaatctctcacctctacttttcctgttttctaaggggaatacagaattaagtgtcacgcagatttttactgtgaacagtgatgccatacctggttgctcatgagttcgtcgttttctttgttttagattgatgaaggactgcttggattttgactttcctgaagatgttaattatatgtttcaaaaatcatgtgttctgctaaaaatcacttatgcatagccttggaaaaagaactggaggcagggagttgcttcagcgtgcagaatattgttttggaggccttgggaaataaatcttgagttagttcatttaccaccaagacatatttagtcactgtatataaacaaaagaagtcacagtgtgcctggacattatttgtcccagatggagtttaaacttggctcattatactgcactgatgtcatggtgcataaactggctctgaattcaacgtgcatagaatcggctgtgcttgtatgtgctgaggacatgcgggaggaggggcggggctggctggaaaatctttgtcacatttttcctttgctctctgtagagactagtgtcagtcttgaatttggacttggtgcagaatgagggaagaattggaataatctgttaatgtgtacgagtcagtatgtgtatgtcctcaaagctgtagtgcttccaagaccgagaatctaagtgtgcctggctttccaacagttacttaacaaagctctagtaactcaaatctagaaaggaaaatcttaaaggcattacattttaaaagagcatgtttagtgtgtttgccttgaagtcttaaatctggacagcttctttaaactttgcaatggtcttaagtatccagctgtaaaattctgttttcctggattgtatggtggacaatgtctcaaactagttgcttaaaagtatgtaaaaaggtggccgattttaattcttcctgtgtgctttgagagggcagcttgtgggtgagaaaactgagccggagagggtcctttcctggacttctgagcccttaataggaaatttccacatactgtggtgttactttattactttttattgctggcttttgttgtgataatcttaataagaagcatttccaagtaattcaaaccattttgtagatgtaaagggcttagatttcagaacttctgtgaatggattcctataggagtcactcttgttgccgggacacagaagctgagcagacactggaatgtgaatgcattgggaggtgaacctttaaggagagcgcaaatgtttaccaaagagaaaatctggtcagaggtgagaagtggttggttttagattttattgagagcatgaaatgtggcagatttggtaaaaattttttcttgagattgtaattttacttaactgagagacttgtcactggtaggaatttgaagaaaaagaaattgggggtagaaggctctccttcagggaggaacgcatatttcctagaagagaacttgtcctgcctttggggatgttcctttgacctggttaactgcattctctttattttagcagtcttgttgaattatctccatattgaattgacatggtgaaaccacacctagtagaggggagaagtggtggtgtgggctagatgagtatgcattttggtcagacatggctggattccagtcactttgtagttttgtgaccttggaagggttgcttttcttcttcaagcctcagtttccccatttgtaaaatctagttaatatctacctagcagatgacagggattcaataagtagtagctgtttcttaatcattatagaaaaaaacctggaaaaaggagttgataaagtaccttgcatcatgccgaattaatcttacagatgtgatattgaggatacagcttttgttgtttttgtttttgtttgtttttaacaaagaacagtacatttttatttttaattttaacttattatttattattattattttgagacagagtctcactgtgttgcccaggatggagtgccgtagcagctgccgcctcctgagttcaagcgattctcatgcctcagcctccagagtagctgagactacaggcacccaccattatgcccggctaatttttgtatttttagtagtgacggagtgttggtcatgctggtcgtgaacttctgacgtcaagtggtccacctgtctcggcttcccaaagtgctggggttacaggcgtgagccaccacacctggctgaggatacagcttttgaaccttctattctttgaagaaaacagtattaaaacttttggagtagtggatatccttgctccttattttgaacagtgagagtcctaaagcccaggaaaactcaaaacatatttgccatgtatcctacgggttgtgttgagcaaggggagcttcacctacaatgtgtgcccttggaccttgagttcccagtgtttgcttaggtccgcttgggggcttcctgttattgtatatgatttttcaatcagctttggattcaggcttcaggtagggcagtgagcaaaatgaggcaatggatacattcacatcttcttaccaggatctttctagtttacttgcttatgtttttaatcctagacattttctttgcatgtgttattaccacaaagatcaatattgggcattcgcaccccatcacttcccttttcctgatttggagaaaagaggggactcaaaaaacaaatgctgcttacttttcagttttgcctgaggccagctgtggtctgttgcacacagactggggtctcaaaggtgtgtgtgaatacacagtttgggtgtgggggcctgggacgagcttggagactgggaatcttgggggtggggctgaggagtggggagtgggagtatatgtgaccagaaaatagtggcatgaggaatagacggtagtactcttctcatgtggttaaaggtcacttttaaagttattaggtattcctggatagtatgcttagttgagtggaactcttctgcagcttttagattgtatcaatttcccccttaaagatacctgttggataatcataaatgtgggctccaaggaggaagtgttcatttatacatgaaaacaagcttcacgaagtgtggccagtggaaaaaactctggaagtgaaatgggatctcctttctgcatggtttatatcttgattgtctgaggattggatttaacggttaaaaatgctgcaagtgtaatattttgcctttggtcagttggtaccattctcccaggagacgctttttttgggagacagtcttgctctgtttcctgggctggagtgcagttggcaccgtcacggtttgctacagccttgacttcctaggctcacgtgatcttcctgcctcaacctcctgagctgctagaactacgggaatgcaccaccatgtccggctaatttttacaattatttttgtagatatggagtctcactatgttgcctgggctgctctggaactcctggtctcaagcgattctccccatctcagcctcccaaagcactggaattacaggcatgagccgcttgtacgtggccagaagcttttttgatggactgatactttaccctgattgcttatttgagtgactggtgatttttttatttgaggcataaattagacatttgcctccagaagtagtcttagatactattgacacctggttaatcagccacccaaagtttaaactgcaaaagtagccttcctttccctcttttaatgagtaagaaacagagttagttttagatttatacctgtaaaggaaagatagtaccccttctttcagttcccctgttagacaaagaattcccatgatgctgtatttgctcaattgtattaattgtaactcttgttttattgtttctgtggactttggaagagtggtcacttattttttattaaactttgataaactgccttctgtttatttccagcttcatggttcttgtagcactaacggttttgaaacagatctgatgaagcaatagtagcttagaggatgctctcatgatttgattagcatggttcttcttaacatctctggagaaaaaaatatcagtagttaaaatctttgtcttttttttcttcctgtgaagacgtggtgcaatatgaatcagtttaatgctgactttggaaaagtaggaaatgcttagtgagtagacgaaaaatgatgcggtttggacagcaatgttctgtttcgcattttatattaaggaggacttgtagcagttattatatttctgctttgtggctggggagagggaaggagggagggagagagagaaacattgcccaacttgtatgagaggaaaggttaagtgccgggagttggccaggttgtgactcatgctcctccggggctgcgtgatgcaagacctgccgccagctcattcatgtctgctgtcaggaccggtcattgggctggtgtgtgtcaaacttatttttatctctgctttattgacaatgaaaacagctaggtggtcagcctccctcagtataataaaatgctttcttttaaaatacctcagtgccaagatgaatacagtttgtttaaataatgacttctcctctactgagaaaaattgatattgggacacaggagacttgcctggtttctgaggtaacttggtagattataatctggttgccatggctactcagcagcaatgaaaattacatgaactaaacatttgaagggtggtattttcgtcggatgcttaaaagcccgttacctatcatctttctcgctgaagaagtggaatgggggtcaggaattgaactcagtaagcagtgggggaagacataagtggaccttagaggctggatgcctctgggtcgttctttgaagtttggcctggtgtcagtgaccactgaggaactgttacagacactttttatgcaatatgataagcagataacgtgacgacagtctggacatgtcccaattcagaaatccgttttcttgcctgggactttccgtaatattggtgaattgtgttttctgaaccagtattcgggacacattgtctgacaattatgagcgtggtagaagagagtatatgaatttgggattgtcagagaaaatctaggacagagtcttggcatccattggttccccgctcccccaactaattaattccatgggcatatatcacagttctatccctagagctttaaacacaaagcaaatggtttctgctttattacagtgatgctagaattggtctaaggacctttaagaagacctggataatcgtctgtattgaagtgttgttttcttccattgtagtttttatattgtatatttatgtaaaaataaatgattttcatgttaaagaaattattttaaaagctccttttcaagaaaacaaatattttaatcattctagagatcttgaaggaatttccttttgagtttttgaaacagtacaatgtacttacattggtggtaatttaaatactgaaaactcaaagattatctacagttgttatacaggaaaaataaattgccttgaaataactgtcataattcaagagcaccaggggtgaagcttagtctgagtttccctgaatgatcctattttttttccaggtaatgtattttttgatttaaaaaattttagtattccagcagtgtcatctggatgaattattagaagaggcaaaatacatggatattaaagatggagtttttaaagatgaaatggctttgatctcaatagttttacaaaacaaattatggtgtatacagtaaataaagttgacttttaaattgcgtcttatgaaaacttaatttctaagctaagataattatttgcaatagtttttaaaaaatgttttatgactttcattcatccagtgaaagtaattattgagcacataacttattctatgccaggcatggggctagatagctggatgttatccctatcatgcctagattgaagaaggaaagacagacactaacataattgcttagttaattaattgcagttgtaaattctaggaagaagcagtagagcaggttttttgtttgatttagaacacatagccgggtacctgacctgtcctaagagttaaacactatatcacaagctgagaaggatgaatagacgttggttgaggatggaggaaggaaggtggtaagctaagatgagggagtacaggaagagtattacagacagacggaacagtatacttgacagtttcgagccagggaagaacagggcttgttccagtaactgtaggatgaatgtgacactgacatcctgtcaatttctagaaattctatggtgatttttaaaaagtgttagccttgtacatggtggtttttaactatactttttgtgatggttgttgtttttgagatggagtcttgctctgtcactgaggctggagtgcagtggcatgccacaacctccacctccaagccattttcctgcctcagcctctcaagtagctgggattacaggtgcccaccaccacgcctggctaatttttgtatttttagtagaaaggaggtttcacccaggctggtcttgaactcctgacctcaagtgatccatctgcctcagcctcccaaagtgctgggattagaggtgtgagccaccgtgcccagcctaactatagctttttaagtttgtattatgtcttttaacttgtatttagatatcaattagtgattttttttcctttgattatcctttgattaaaactattaataaaactataaggctgttgagagcatgtactttgctattaccactcatggtctagtcttggaagttgtctaatattaaatatttatgttcatataagtaaaacattgactttaaacatttgggtatttggtggggcctatttataatatttattgaatactgttcattattgtcttaagatcctatacacagatattctttttacaaaattgtttcttgtaaatatttttttgttgtcacacaatggaatcatataacccagatcagtaatagacacttgggaacagtatgcaacactgttaggtcaaaacctcattgctagatgcagctttcttctataagtatggtttctggtcttttttcttctttaattgtagtttctaaatttgtgaaagagaaaaaggaattgtgcttttcaaagaaaaattttcttcaaatggagtttttaaagttagatagcatcataagcaacacaggagaattcacttagctaaattcaaatgcatgtactccttctatccccatacctccaattaagacttatattccaagttttgtgtttataaaacattttatgccacatacttcctgtctagtgtataaatgtaggtaataacacttgacaaatcccagaggttccagtattaaactgaaattaatgtgttgttttggcaggttattctcgttcaagttaatccaggtgagactttcacaatcagagcggaggatggaacacttcagtgcattcaaggtaaggacatttttggtaaataatcgaatcaaagattttttctttatttgaaggatgtaatgtttttctatgtgtgtctgcatgtaattttctagatgtaaagtatatcttggatattcattttcttttttctgtcacatggtctcaaatatgtattatgatgttatccaaaggatatttgtagtggtaaaatctgtattgggtatctattggttagttattgctgagtaacaagttactccaaactttggtggcttataacaacaagtattaactcacagggggctattggtaggaagttttctgcagttacttgttaagtggacctttccatggagaagcggagggggcttatgttatggcatctggcttcagagccaataactagagggcaagagggagctagtaggtccagcccagactcgagaagaaattatgaaagggtgtgaataccaagaggcaggtcattggggaccatcttggaggctgcccaacacagtctactctttggcccccgataattcatgttccttccaaatgcaaacttccccctcccaagatctctaaaagtcttatcccattataggattagctcagacttcagaatcttgtcacctaaagttccaggtgtaggtaaggcttctgggtgtggttcttttattatagctcctaggacacttctagtttgtatactaatgcctcttctgtatattcacttggaaataaatgacgtaggtactttgatccatatggagttctgtgtaggaagatcaacctagatctgatgttagctggtaaacactgcagtgttaaaaggcactgtttatgatagctctttttggcagtgattgggattatggggtaaatggtaaattggcatgcaattgagatcagtattaggttattaattgaactggaatctaatcagaggctttattattaatacttgaacttgcttaccaatatacaaacaaactgggggaaatgccctttagtttcagtttcccataatgagctatacagaaacaggtttttttttttttttttttttgccttgcatagtagtagagcatgttgctttgtactttatttttgtatctataagaacaaaaacttagaaaatatttcttgagaaatgagtatatttttaaagattcaaggctaatgagttttaattgaagttaatattagattatttaatcatttttattaatgatttctactctgcatttctctgttgtgtcccagaaattgatctttggaattctaaatcatttaaaatcaaaacctagtcttagtcgatgaacaatatgggggaaacttcaggtcaaggaagagaagaagtattttaaaatagtatggactacagggtctttcacctatttatagtattataataaatggatattgtgaacaattaaaacctcagaatcctacaaccctgtatctttaaaaaaaaaatcacactagaaaaactagatgaaagtcaccaatatgggatgaagctgaggttttcagttcagtaagaaagcagttaagcctctggttatggtaacattggagccccattaattggctggtagattatgtccctctacaactaagtatgtgtaatagaatctataaaagcaaatcacttagtgatgaacatgcataaaatctctttcattccacttgagtttacttcttggtgtctaaggagtgtgtgcgtgtgtatgtagtgtgtgtatatgttttgtgtgtgtatatgtatgtgtaacttcactgagttagccgttcccctacttttttctttttttaaatccatgttataactggtgcacttcgcaggaaatgttgcaagtatattgctgtcttcacaatgggagctttgtatttattcatgatgatacttggagataagtgacactaacactccttccagtgatttcaaaaatgcctttgaccaaaacagaattgtggagccatttatctttggctccctccaggcttcctattctttgttctcttctgaagtctcagatactatggttatcttcattttggggagtggtggtacctggcccaattaattgaaatggcacaggatggaatgaggactaggacctggatccaggtgctttgctagggtttcggaagcactagggcaataggatgaactgcagaaactggaaggaaagtcagcttagcaggctgaaccccaagttcagactcattgaccgccactaatgtgtataaaaggcagtcactcaggcaaaaaataagaaagcctttatgtgagttccagtatgagtttgtgaatgtttcactccagttgggtagaatatagcaacataaaatgtggcaataggcagtatatttgtacattccaacacaagttgctgtgtcatcctcacactcccagtgatgaacatcatctctaccattgctgacatttattcagctcaggctgtgctatgcattctgtcctttagtgagtgtgtagttacacacaaggaagctgaggcctgtcaaaaagtcacatagcaagaaagaggcagagttgagttttcttccctggtatgtctgacgccctgagttccttgttctgtgcctttgtgtcagggaggactccattctcttgataacagcaaggttaacttcctgttcctggagtgacaggattctgagctggatagtaggatgagtacttagatacccagaatgagacagatggttcgcagaacaaaagtggatggtggagactgagtcttgggaataagctggggcgagcactttgttaacaaagtgagatatactgattgagcagtgactagcagacagtgtgatgcagggaatattggtttagaactcattacgttatttctgccccaaatcaggtttgggttcagatttggggtggctcagcttccaggtggagcttccagctccagctgttgtcgactggggccagggagggctccagctccaggacaatgggagaggactcgtaggtacagtgggaggcagttctttgccatttaaaaacctaatagaaaggaatctgaaaatggtcacactgtaatggaaatttctgaaagaaatatttgtattttgttagggatttaagagatcgaaactctacttacgttctttcaacaccggccaacaggtgggaggtggttttgttttgttttgtttattttttgttctgagatggagtctcactctgttgcccaggctggagtgcagtggcacaatctcagctcactgcaaccactgcctcccgggtttaagcgattctcctgcctaagcctcctgagtagctgggactacaggcgtgcaccaccacacctggctaattttttgtatttttagtagagacagggtttcactgtgttggccagggtagtctcgatctcctgacttcgtgatgtggccgcctcggcctcccaaagtgctgggattacaggcatgagccaccatacccggctggtgttttttaaattgagggaaaggtgatgggtggtggtggccttcctggaaattttgaagtcatacccattgatgatgccatggttgaaactgtcagcctaataactttgctattttaacactagccctcagattagggactgctttgtggggatttcaggtagggagtggagttggttgctgggccttcctggaaactttgaagtcacattgtatgaggtcagtcctctttacttgtaactgaatttattagtctgataattttatctataggacatttatgaaaccactagaaagacctcagaagctcattgtgatctcattaaaaggcagcttggaagttgaaagcaaattaatacagaagaatatggactgagtggggaagctcacacctataatcccagcagtttgggaggccaaggcagaaggattgcttgaagccaggagttaaagactagcctgggcaacatagtgagacccatttctaccaaaaaaaaaaaaaaagaaaaaatcagtcagttgtggcggtgcattcctgtagtcccagctactcagaaggctgaggtgggaggatcgattgagcccaggagtttgaggctgcagtgagctatggttgcaccactgcattctatcctgagaccctgtctattaaaaaagaaaaaaaatgtgtttttatgggaatgtccttggtgataaggaagaaaacacaggaagcatacaatatgctgtgaatgcagattcatttctaatggaatatttctcaatatttcccatgaaacatgaatcacaggtctcggaggggccaaaaaaggtcatagtttattctcacttggggtcagcctatacctgtggcatcctagacaacagatttattttctcttggccagatcaaagtgtataaagagctaattgttaggaaaaaagaatcttagcaatcaatatgaattttgcctttgcttcaattcaggaattaatagagggcacacttgggtctctcccattattttcatatctgtgtctgggctgaggtgctggcaatgcagccttccttcctgtctacacatgccatctttttatctgctccctgtaaaatccgccagccaaaacaaacatcatgcttcctttaagacttcaggcctgtctcttccaagagccctcccagaccactgcctgactttcccctgaattctggaggagcaggtagaggtagcactacacagtctggttatatgcgtaaacctttccttagctctcgaattagatgtgaattcagttgtgacaggaaacagtgtatcttaaccccgctccccagctacacagcttagaataattactgactggattcctgactggctctggtattacattcaagcatgatgatttttcttttcagttttactcttctgttggcagtttaagatgtttagttacgtgcttttagcagtctctaaatctcgatagaagaactttgaaataccacattgcgttgataattgaagttaatgagtttcctttagagaagcatgtttaaattctaaagaacttttataatgaccctacattaatactgtaattttttatttaagactgttatatataaattgtgaggctaaggaaaacaggtgagtgtgatactgattaaaaaaaaaactgattaaagtaaaattcttaggaagcaccattattttagtaaacagtaatatttaaagatacttaattactaatgggttctgtccaaaataatttaggaatcttttaccatagcagttaatctgctaacttgtgttaagtgaatagagacctcgaaatgactaaatgacaacagaatgcgtggtcagaggggacctctaagaggggggcactactatgaaatggctgtaactttgaagctattcgaatgtgaaactttttccgctcttgcttgttctccgtaagactccctcagctctgtgtctaattttccccctgccccagtgagtgtgggaactgtatcattgatgaacaccacgctctgcccagtgactctgtgaatggcaccattgagagctgttcaccatttctgaatttcctcatttgtctcccatcccccgcccctccatgtatgagtcagcatccagaatgtcacagggaccctagtgttacttgtttttccttatgtgatactttggggaccttaatgttgcttttgtttttttccttgtgtgatactttaagtgcatttattagacttgtttggcacattaaaacagtgacctgtcattctttctaagaattttatgacaggtcctagggaatttgggttatctcttgcttagtttagtgtgaaatgacaagaatggtgtcatagcttgagcttgcaaactgaggtagactgaaacttcaaaagcaaagcatgtatatggtctctcccttttatacatactttgcatgtaaatgagaaattcctgttttactagcttaaaacccaggaagagtacctgttgcaaatgaagcctgttttcaaagactgtagtggatctctgtcttggcttaaatttgcaaccagttttttgataaaaaatatttgggtgatttgaaagtaaaattattgtaacatgaatgcattaaattctaaatctttgccaacttttattatattggatgaattgttatttgactatttgtaatctgtattataaatggaaatgtttcttcctattacaagattagggttttaggagctggttttctacataagaaactgccttgaaaaccatttcttttttttttttttcttttgagacagggcaccctgtctcaaaaagaaagacttgctctgagacagacttgctctgtcacccaggctgtagtgcagtggcacgatccgatcatagctcggttgcagcctcaacctcctgagctgaagtaatcttcccaccttggcctcccagattgttgggattacaggcatgagccagtgtgcctggccgaaacccatttctttagtatttggggggatttgtgagggattgctaacaagctgaaatgttattgtgaacacttaggcctcacttggaaaatcttctagaattgaaaataacaagtcatttgccaaggctaaccctactgtcatggccatctttctttctgattgatctgaagctgtatagttagtcctcctgggggctctacgccaagacagtctgaatttctaggaaaatctgaatcactctaccaattttccagctcaccttacgattcttaaatgttagcttcaagaccagtcttttacctgtgtgtgtttatactacaaatatatatttacatgtgtgtgtgcatatatttgtttcattagaagattttttcattttccatgataggatttacattaaatttggagaaagattgaagaaaaattactttcagctttgtggagtactcttgatctctgaaatgtttgggggctttattttgtacatgacgagttagcagttcctctcaacatggactgatgcacagctatttgttacaaatagacattccgtatgctgacctgataaacccctttacagacagcctcttgctgctgagtaactggaagtttaccagcaggtggtttccaccagggccggaaaatactgacaggcccagaggagaaagtctgggttatggaaggattgagagcaaaggctgtgattgaacgtgcaactgtcatcttgctgggattgtgtaatgtcatgaggctgggttacatcaataccaaactatgttgctttcctaggaggttttaagtccctctcaagggaggtactcggggtatatgctgcttcctgcctttcttcttcctgtctcagttatcttgatttttatgcttattcttatatttacataagaatggaatgttaaacccttagataaaactgtcacctaatgttctgtcatcagacttaagatgaattggtgttgagttctcagagtatagttctgtagtgtgaatccctggtcatttggtagctaatgcttaacctgttagccccagtttcctctcttaaaatgggaacaatgatagtacctatctatctgataggattgtgaggataatccattgtaagtgtcattattatgatcatcattatctagttgtatccacagctttgctgcttttttccccctaaatagatggcatgattaattgtgggcaatgacttcattttcctacttggagaaatcagttgaaattctagtctccctttcattgcttatttatgatagacttgctctcatagggttgctggtgatggcaccagttcaaacattttagatgaaggtttataagaatatatatactgttcagatatggggttatagctaaaacaacaggttcagtgttccatgaatttaaagtaaattttgttgtagttttagttgttggttttcttttgaataacagccattcactctcgcaccatgcatgagcagctatattcagagaaggctctatgttattttatccaataaagcagtttttctagtgtgtctcctttaacattttcattgaattccatacttctggctgggcacagtggctcatgcctgtaatcccaacactttgggaggcctaggtggggcggatcacctgaggtcaggagttcgagaccagcctggccaacatgttgaaaccccatctctaccaaaaatacaaaaattaaccgggtgtggtggtgggcatctgtaatcccagctactcaggaggttgagacaggaggatcacttgaacctgggagatggaggttgcagtgagttgagatggtgccactacactgcagcccaggcgacagagcgagactctgtctcaaaaaaaaaaaaaattgtttccatacttcttaaaatttttatttagtacattctgttcttaggcagtaccaagaagcagtaagggctatctatacattgggaagggctatacattatgggttttagagtgagattgcctggcttaaaaatcccctgcacgttagttgtatattgtaaaattagttccttaatttctgtacgcctcagtttccttatctgtagagctggagtagtaatttctgtcctgaaggattgctgtgattaaatgagttactgtgtggagagcactaagaacagtttctgagtcatagtaagggcctaatatataggagtgattactaagcttttggtctttattatgggtgggcattgaaccccccccttcatttttttgttacctaatcattttaaaacatttcagaaaacctgtgtgaactggagttattaggatttttttagatgtctttacgtttaaattctaacacttcaaaataacatgtttaaaagttatgcaatcgcagtttagcttctgaacccttctgccctttaggcttgttaaacaatgattaaaatgtcatctctgaaggtaccactgcttagagttctttaaatgtcacagatctttgcatgtcagataattcagaaaagcaagcagtgtcacattacctcaatggttggccacaggttatttcacagcttgtagtctttcagttcctgctttattctttctgtattttttactcttgttcttacatttccaacctgaaatagaaaagttcatgttacaagtgtctttaaggaagactggattaagttcttcaagggcaagggtcaaagcttagtcatctgtgtatcccagggcctatcctgcacgtaggaggcatagagactgaaggaaagtcatttcctgatacttgtcttagtctgttcgggctgctataacagaaatactgtagactgggtggcttattaacaacagaaatctatttcccacagttctggaggctgggaagtccaagatcaagacactggtttctttggtgtttgtagaaggcctgctttctggttcatagatggcagtttctctctgtgtcctcacatggttgaaaggcctgggggtcttcttgggcctcctttataaggacactaatcccattcatgagggattagtgtccctcatgacccaatcaccccttctaataccaccccttcttttttttttttttgagacggagtctcgctctgtcacccaggctggagtacagtggccagatctcagctcactgcaagctccgcctcccgggtttacgccattctcctgcctcagcctcccgagtagctgggactacaagcgcccgccaccacgcccggctaattttttgtatttttagtagagacggagtttcaccgtgttagcccggatggtcttgatctcctgacctcgtgatccgcccgtctcggcctcccaaagtgctgggattacaggcttgagccaccgcgcccggccaataccaccccttctaataccatcacctttggggttagaatttcagtgtatgaatttgtggtggggtgggggacatgaacattcagacagtgatggtgctgttgaagatagaatgatggaaaaattctcttagttaatttagagaagttatttatttttgttattctgattaggtagttaaatttagttattttcactcttagttcctcaaattaagataatataggcatgtgtttccaaaaacagtaattctgaaaagtccagtatatggattagcttctcttacctgtaaaaatgcatgaaggaatcattatattgatgcttttaataaccttcttttgggggagaataggatgggaataccttagaaaatgttaggctatttaatccttaaagatgcataaacttttccccaaacttcgtatttatttttatattattaacaaatattttaatttaggttactcattaattttattaatattttatgttttcttgctgttggaaattatagcgtttatgtgtagtaatgaattcttagtaaactctgtgtcagacccaagaacaaattatgctttagtaaatgagggccgggcatggtggcgcatgcctgtaatcccagcactgtgggaggctgaggcaggcggatcatgaggtcaagagattagaccatcctggccaacatggtgaaaccctgtctcaactaaaaatacaaagattagttgggcgtggtggtgcacacctgtagtcccagctactcgggaggctgagggaggagaattgcttgaacccaggaggcggaggttgcagtgagtcgagatcgcatcactgcactccagtctggtgacagagcgagcctccttctcaaaaaataaataaatacatacatacatacatacataataaatataaatagtaaatgagtctgatttgtgcttctcagtttttgcattgctataaagaaatacctgagactgtgtagtttataaggaaaagaggtttaattggctcatggttctacaggatatacaggaagcatggtgctgggatctgcttctggtgagggcctcagaaaacttaaaattatgacagaaggcgaaggagagccggcaagtcacatggcgagagcaggagtaagagagagaagggagaggtcccagacttttaaacaaccagatctcctgtgaactgaatgagaactcactcatcaccatggggatggtgctaagccattcctgagggatccatcctcacaatccagtcacttcccagcaggccccaccaccaacattgggaatgacatctcagtgtgagatttggaggggacaaagatgcaaatcatatcgtttactgagttaaatgaaggtggcataatggttttcctctatcagcagtgtgattgaagagggcaggcaggcgtcaagcctgaaggagggcatttgtggtgggatgtggaaggagaaacacgtattacagacatttaggagatagtcatgacttgtgaccaatgagaacacactggatgaatgtttccctaaggtggatgaactatagtgtcttagaaaaatgtttgtcttataacaaaattgacagcactaaacatttttactctctgtctcttaattgtacaagcattaagagtaacaaatatgggtttaaaaggcaaacttttttttttaagtgagtattttttcgttttcctcaacttgggtatttcctctccataaaggtgttatatttaaattatggaacacctttatggatgctttatatattgcattgtggagccagttttaaacatctgttttgttatctttctagctataggagtgtccacatcttcactttatttaaaaagctcccaggtatgtattagcagattattatttctgttccaaattgataagaagaggaggcctagcatcaagggaaaagtctttgggagtgaaaaaaagagtggaaacttaaaatataagcccttttcttgttctatcttctagtgaaaatgttattctgtgttagagaaatgaccagatgaattttgtttcctgtttcgttttgcagttctcattaaagtgggtatacacatatacttatctcatgtaaatgtcaaactgtttgtttgttcttgaagtgctaagtcttttaacagttctcctcggttggatgtttgaagatcatttcggtatgtcttatgctagatccagcaatgtcagtttttgcctgctgcactgtggtaccctgtggacaaaacaagtataaatggtccagatttatgatggtttaagattgttcaactttacggttgtttcgtcaggatgtaactcggtcgcaggttaaagagcatctgtacttaggcaatgagagaactgaacttgtgttctgttgaggaagagtaatctttgcaggtagtataattaaatgtttaaattgtctttgagtgtaagcttgaaatagttttttgtttgtttgtttgttttgagatggagtttcactctggttgcccaggctggagtgcaatggcaggatctcggctcactgcaacctccacctcccgggttcaagtgattctcctgcctcagcctcttgagtagctgggattgcaggcatgtgccaccatgcccggttagttttgtatttttagtagagacgagatttctccatgttggtcaggctgatcttgaactcctgacctcaggtgatttgccgtcctcagcctcccaaagtgctgggattacaggcatgagccaccgtgcccggctgaaatagttttttaaaaatgttactaaaatataaaaaaaagcgtggcactgtcaacccatgagttagaaataaagatccaggattaaattggttaatttattcttagttaatagtcaagacagttctcattctgtgagtcaagcactcacctgttgagtgacatagttcttgatcatatgcccaaggaaaaggacatgtctaacattgcagaattttaaaactgtgtattaacagtggtttgtatccttttgcacatcagaattacctgggaacgtaaaaaaaaaaaaaaagtttaaaagttgatatctaggctagttgtagtgaattgtcacattgttgagcacaggggaatggtcagattgtagggactgggcatgagtgatttttaaaagctcccaggccattcgaatatgcagtgaggttgagaagctctggttaacgtaaccctcaggacagctcaagaaattctcgtgctgtgccttcccatgtacattgcagtgcacatgttgtgtacctgtggctgtttttcaggttcatcttctttagtaagtttggcagttttgtaaagtgtctgaagatcttttatcttgtattcttatgcatattaagtaaaatctatgttgtagttgactttactgaacctattaaaattgttttttagctttggttataagcttctaagtaataaacaagaaacttcagaaatatgagttactgctttcagcagagtacagatttattttatacttaaatgtaaacacaatagttcacgtgtgtttaatgaaattcgaagttcacctatgtttaatgaaatttaaagttgattggaacaggtatgattatgcagagtggacagagtttaaaaaatgagatgagaaagctgggcgtgttggttcacccctgtaatctcagcactgtgggaggccgaggcaggcggatcatttgaggtcaggagtttgagaccagcctggccaacatggcaaaaccctgtctctactaaaaatacaaagattagctaggtgtggtggtgcacgcctgtaatcccagctacttgagaggcttgtggcaggagaattgcctgaacccaggagatggaggttgcagtgagccaagatcacaccactgtactatagcctgcctgacagagtgagaccctgtctccaaaaaaaaaaaaaaaaaaagtgaggtgagaaaataaccatcttaaaacttgccacttttcagaagctgataagctactgtgaaccctgtttttgcatgcctttatgaaagaattggactgggactttggcttccttctttgttcccttcctaatctagttcgaacagtgtaggtccccagaaatcattttggtgcttgacttgggtgggtggtccctatagtataggaattcagtatatgacattgatgtcagaccctcaagattatcaacaggtagaatcttggttctcaaaatgtaacataaaccagaatcacctggagggcctgttaaaacacagttgctggttctacccccaggatttctgattcaggtctggggttggtggggccagagaatttgtatttctgagttcagggtgttactgatgttcttacttcaggagttctgagaatcatggaggtggagatcgttggggttggtgacatttggaagagaagggtatttacagacattgtacccttaaatgaacaagaaggctctcagaattaagtttggtcacacaatggacaaaagggaaaaaaattaaatctagatgcagaaaaataagaaaaattgacttaaaaattattatttgtaagctcaaagctagaattttttctttttgaaatttttttcctcccttttctacagtttgaatgaattgaggtttgaacccgggactctaattttcaaaggatttgtttgtagtcattcagtttacatttcctaattcagttgctaattttattaggttcctaattttattaggaacttacttttcttcactgtgcctcagtttccccgtagtaagaatatgattgctagagatatcatcaggatattttaaagtctaatgaataatattgtgtagtatttggagatcaccaagttaggaaacttaaaaatatgaaaaatattctaaacagatatcccagattgtgttcaagtaataagtacatccctttttccctgtcaactgggccacagtaaaagaagaagccaatgtggagggtaaaaaaaaaaaaaaaatagtggaccaatgtgggagttggcttcattttgtaaagtattgtacagaaatgggaatgttttaaagcatgaaactggtgagaaaggaagtgactcaggattcaaaatagataggactccacaccagtaatgatctggaactgaggaacattgcctacagaagagagaagccatgagagacagttgaggtgagtgaattggctcgatagaaacatggaaaatggaattacactttttttttttttcctcatgtggacagggactattgtagaaatttagaactttgggccctgtttaaaaaaatctatttcaagggtcaaattgttgattgccagactgattattattagtaattacaggtacagcgctgtggatttttctcatagtgtctgagttctgctcctgttcagtggttgagttcattgatcatttttctgctcctcattgcacctgtcatgctggtaacagcaattaacattcctcagaagcgaatagaatgccaggctccatctcagatgtaactcaagaacaacaggtgcattctacctgtttcttggctatacccagagtagttagaaggcaagtaattaaccatagaacagactttgaagaaaatgagattctttagaatttgagccaaagtgctgaaaagtagctctggataatgtatttaggagacataggaaatagctcaacaggaagggtgaaatagccttaccagtctggcctctttaaatttgtttcaagcctgtttcccttcattgatacaaatcttattaactctgcaccttccacagacgttttgttttgtgcagcttttttttttttttttttttttttttctggatttgtttttatgaagttcacatgaaaggtcattggacttgaatttatactgtaaaaatcaattaattagattcttaaattttcttctcccctttaagtgaaaacacctaatgaaactttctggctctgagaaaaggaagagggtccccagatacaggtttaaattccttaccatttagtctggttccattgatcaggggttccgttttctcaccttaaaataagaggattagaacagataacttctaaaattatttttaccacccattttctctttctttaattcctgtagagttctctgcagtttgtatgtccctaattttttgaaaatatgtaaagctttacttacataggttcaagtgtgggcagatttcaagagcttaattatctaggattttctatttgaaagtgagacattaaattatcattgagaccttactttaggtcctacataaatttctctaaaattttattagtatatgttaatcttgagtagtaacaacaggaaagaaaattcggtgtgatttttcttgttttaataattggtactttaaaaaagcttgtgtgtaccttttgtatgtcaggtgttttttttgtttttttttttttgagacagagtcttgctctgtcacccaggctggagtgaagtggcgtgatatcggctcactgcatcactgcaacctctgcttcccaggttcaagcgatactccagcctcagcctcctgagtagctgggacttaaggtgcccgccgctgtgcccatctaagttttgtatttttagtaaagatggggtttcaccatattggccaggctggtattgaactcctgaccttgtgatccacctaccttggcctccaaaagtgctgggatttcaagtgtgagccaccgcacacagccatgtcgggtgctgtcactggttgttaatcttcgctgcatgtttgaattgctagaaatttttaaaaaatactgatgcgtgggccccaccttcagagatttagaagcaattatggggtcccagaatatttttaaagatagtgttgttataagtatttcgtttacattgcgcttcaaaaaaaatttggtgaatttaacttttatgcctaatattgaaggttttgaattatttgtgagcgaaaaaaactctaaaacatagagaagtggtaccttctcatttaaggtgtactgcctcagctgaaggatgtttgtgtgtcttgactgcccatcccccatgtgtacacctcttacccactgagctagatgggatggcctttctgcttgtttctcatctatggggcattacatatagttgtcctttttgagttgtttttttagggttatttggtatcattttgtcaaatctatgccactgatttttaaatgcatcattattttttatgtctctacaaaagagaaaacaccaccgattaagttgacttcctttttcaggagatgtgaaaatgtgaaaaaggtacttggaatcagtaaaatatgcttataagtttttatttaaaaaaagtttgtgggtacatagtaggtgtgtatatttatggggtacatgcgatgttttgatacaggcatgcaatgtgaaataagcacatcatcgagaatggggtgtccatcccattctttatccttcaagtttcaaataatccataaaatacactactttttgtttttctcatctagatattaagcttttaaaaatcacaaatctacatagggttttttttttctaattttgtgttgcataatcattttgtgtgtatgaaaaaattgagatagctttctattcagtctccttctcagttgtagaaatatgactaatttgtttaaacatcattgcttctaaatatgccctggaggacttacatacaagtcataatcttgtgatattctttgtttgttttaacttctcacaacgtctttgtctcattatgctgaaagccttatttatttgtgtgtgtgtgcatatgtatgcatatttgtgtgtactcatatatatgtatgcatatttgtgtgtactcatatatatgtatgcatatttgtgtgtactcatatatatgtatgcatatttgtgtgtactcatatatatgtatgcatatttgtgtgtactcatatatatgtatgcatatttgtgtgtactcatgcagacacacactctctatgtgtgagtgtgtatgttggccagtgctaccacttgcgtgtgttctactttgtccaaccttttggtaaaatctacactttgggttttaaataattttaaggtttccattgttcacgtgtttgctgttgtagcgttatcctattaaaaactatataacccagttcagcaatctaaatgtgcttctaactttatatggaaactatttagctttctttactcaccacctcccctactccactccctactcccccaacctctttttttttttcctacagtgttaaccaagtgttaacctttggatctagcccatctgcatctagatacttcacttgcataataactaatttaaatttattccagatgtataagaagtatttgagatttggtagttttaattttggaaatgcttttaaagtgttatccgagattaataggctatttttcttccatgaaaatgtatatttatttaaaacctgtggtagctgattaaacttgaaataccctaagtcctcatgtaatgttgtcgataggttcttggaaactgtaagtgaagctttaagtgaaacatataacaggtccttgagttgcgttgtttccttggacgtggatttgttacagcactgatgaggggaaaaactgttagcgttatttcactcaaagttgcagcttccaagaacccatggatgacattaggtgagggcttactgtatttctctggttttcagtaagttaaaaggtagcagaatttcatattttcattctccccatcagtagaggagctggtgatatccacttgtggatgcgcagtcccagtctgatggccaggtttgatgaattggccgctcactttagaggggctgtcaggtttcttcatgttcacaaatgactggaaataaaaaggaataccttttacgtcgccagctctctaaatacctatataacatttaggtttgctttggctgccaattcctcttcacaaaaatcactggctctgtgtggttttctcccttttctggttcactcttcatacccatattgctgtagacccctcttagaagcctcacctaccccactccccactccttttgcatttgggtttctgtgtgtatgtatggggtacttaactccttctaagtagtagctcagggcctggcaaagttgtcaggatttaggatgagactgcctttgctgtgtttccacagatgtgttgcgttgcttcctgtccattctccatccagtgcccattctccgtacccttctccatgtccttctccatgtcctcaactactctctgtcttcacctcccgtttcctgtttttctcctgtttctgctactcatattctccatgggaagggcttttttttttttttttttttttttcccgcctttcaaacctggtgtttttggagagaaggttttgacattggggctatcttttaagaagtccttcccctgatagcagaggggaacgtgctcaacttacaaagtttctgagaaaaatcacacttcttcttttcacaggacccctgtttgaaatttgcaacaaattaaacgcttaggaatcccaggtgcacaggagccctgctgtttcagtgcattccctttaatcatgttggttttcttttttttttttgagacggagtctcactctgtcgcccaggctggagtgcagtggccggatctcagctcactgcaagctccgcctcctgggttcacgccattctcctgcctcagcctccccagtagctgggactacaggcgcccgccacctcgcccgcctaatttttttttgtattttttagtagaaacggggtttcactgtgttagccagcatggtctcgatctcctgacctcgtgatccgcccgtctcggcctcccaaagtgctgggattacaggcttgagccaccgcgcccggccaatcatgttggttttcatgaggattgattttggactcactgggccagccacatgaaatgtggtattgtcattgtctctttgtacaaaacaattcatttgctgattgtcatgaatccatcctgtgaggtattatgatgacatctggcatgccttctttgtttactgtgtttactgtatgtgtttagaaggaaaaagcctgtagtgaccactttcctgtgtcggcccctgggtcaggctttccatcctgactcatgggtgtcgggactactagattggttgatggggtgtgcagaatttcctctgtcgggcttgggagccagaaagccacgatgaagtttgatttggcttgtggcagccttttccaaatatgaatttggatacagtacagtaagtcctctaagaaaaggagaagaagagaaaataataactctagagctgggactatctggggaacactgaaaaacggggaaaatctcaaagatagtattctgtgtctcccctgagctgctgtcactgtggtgctcagaggccagcctttttttccaagccgagcgctccctgaacttgggagaaaccacagaggcggcctctgtcctgcatgtgctgcacactgccttgctccagactgtcttgaatgtgacctggcagccagtgctgtttcctgctgacgtggcctcccacaactgagcagaacagagccacctcagtgtgctgaggaaggagcgagctgggggcatgaatcaccagcgggatacggaacaaatgaagaggggaaagcgcctaactgttcaggtttcctggtagctatacttaaaagacacctttcttatagaaaggaaggaggaggaagaaaaacaggagtgaagaatgcctcaagagtcaaagagtgatttgtttggccctaggaaggatttcttatcagcaggagttaccttctggggtaaaccccagtctgcgccagacatctgagaggaatgctttgaggaggccagactggcctgtcgccttcacagccacactgttgcacaggttggttgtgggtgtgagctcttagccctgtcctgcagacaggtagtaaagaaacaaaagcctaaaccaaaagactagagtttgtgtcttggtggaaaaagttccctcaacttggtaggaaccggagaagaggactctgagaaactgctcaggagcaaatcctgtggcctagttttcctgtcaatgctgtaacatcccactcgatgctcaatatgcacttgttttagccactactgaatattttttgagtttgcttatttgaagaggtccagaacaactccttgttagtgtcttctaataggcccccaaaagtatcacagaattttagagtgagatgggactttaatctgattgagatcgttagtggtttcttcttcttcctttttttttgagacagagtcttgctctgtcgccaggctggagtgcaatgttgcgatctcggctcactgcaacctctacctcctgggttcaagccattctcctgcctcagcctcccgagtagctgggactacaggcgtgcgccaccgcacccagctaatttttgtatttttggtagagacgggatttcaccatgttgaccaggatggtctccatctcttgacctcgtgacccgccctccttggcctcccaaagtgctgagattacaggcgtaagccaccgcacccgggctgtggtttcttttaagaagtgatcgtagaaccttgtcttcagttactcccacctgaaaacccactgtacaaaacatgcaggcggaggtgactgagggcagagaggctggagcccagctgctcatctttcttctagtggtggccctggaaacttcccctgaccgctctgcactccagcgtatttaattgagaaaccactgatcaaatctacttccttaattttataggtgagggaattttacctttggtagggtcacgttgttaggtcattatggtaactttcaaggtgcctgggaataaaagtttcatacctttaatctgtctcctgcttttgagccttcgtgatctctccgggagctgcagtaatggcttcccatcctgcgtgggaagaagtggggtgctggtgggataagttgggggctggtgatgtactccacgtgtttgtaggtcagagagctggaaaccacagagaacagcccaggtggtttcattagtccaggtgtgagatcacggggggtggggggcggggtggcagtaggattggagatggagggaagctttgaaaggagcccttagtactttaagatatggttaagtttttaagttacagaaactggatatggaaaattaccaagagaacttagtcgaagatgatcctcaaatacccagccaaggccatagggagaatgtggagactgtctgacttagatagtggaaagtctttctcagttttctctgctttaagcttcattaagtccctctcatggggagtcttctttggagatagcaaagcagtttgattccttgattctctttgctgctgtggcatcccaatctgattgttgaatgattgttggtatatggtgtaacccttagttctggtgtgtcattgatctacacaattcacttgcatttattttctggattgctcagcttagattatggaacaaaaccaagggagattcaggtctgtcatactgacctcattcctggttcagcactgactttcctgcatagcctcaagtctagtaggtaggtgaacttgggattacatcatttacactggccacgttttccagtgttttcccctttcttggaagctgttttctcctgttgctcccttgtaactcagtcaacagaagcctctgcccagggtaaacaatttcctaagaaaagcaagcaaaataggagtgaatggagaggatgggatattaaatatgtaataggtttatttaccttttcagtaaagtcacttgatttcctttaaagaggctttgattttcttggaccatgcattggtggaattagaaagttacccacatcatttatggtattttgttgttactgttgtaggctggatttgtactttgtcagggcctagaaggggagaaacagccttatctgttaatcctgttgcagtggcagaagtgttgtatatgtagctataggttcttttcctcaactcatactggaaaaagaaaaaaaattgcccagagactctttttctaaatgtttttgtgtaaatctgttcttcaaatacaactgtgagtaggaggccatgtcagtggggggtgatcattcttttgtgtgatggtaatgagataatttctgcattacagattttcaggagactctttgtttaaatgaaacttcggagccctcacaaagcctcacaagtctctttgcctcattaaaaaagtttttattaatctcatatgttttgccatcatcaattgcataaacaaataaaattgttttgagcaatagaactaaggctgtcgtttgtttggcatcttgtcttctctcctcttcctcaaatataatttgacaaaatctggctccgagttgctgttggagctgttgtacccaccattagccaccggctccaagtggcttccctgccacggccacgttcactctggtcttggatggaggcgagaggaagtgttcagattgtgtgcaggacgtagccaggcaggttgctgcctgaaggctggcagcctctttcacatgggctggcagggatctgcagccagcaagctatttccgttacgttgagtgaaggaaccaggtaggcctgagggtgtcaagttgctagccaagatcttgaacgtttctttgtatgtatcctttgctaattgaacctgcaaaacctaaccatgaaagggatctacagagaaaagtggctagtgctgagttttgaagtcttttttttttttttttctccagtgcctgctctctaaagcaactagtatttatttggttaaaaagcagctaattaatctgtttgatcttgatgtggaaatgaaccctatcgaattccaggtcaaatcacttttccttgtagaatgtttttttaaccttttgaggtgtgtttcatcagattatggactatcagaagtttacttgtcctcagtattccggtctgcatggtgacgtggctattgttctaataataatgcttttaagtataaacctaattttatctacataaagaaaagtcacatttatcaacggactgtgaaaagttgtaaggggactgtgtaacttaattatacaagcagtgtcatatatggcagtattcttgaaaaataccttgccatctggtcccatttatttgagatgaaatctgttaatatttttccttttctcttcttatgtttcactaagctgccagctaatattattttccttattttaaacatgaagaaacaaaggtccagattggccaactaacttatgcaaagtagtggtagagccagaatatgaactcaagatggtaccaaagttcctggtatttttttttccaacttttatttcgaaataatcatgaatttttaaggagtggcaaaaaatgtgcagggaagttccatgtatctttcacttagttttacctcatggtaacatcttgcataactatattttaatatcaaaactgggaattgacgtgagtacaatccacggaactcattcagatttgtaataatcactaccatcattaaaatatggaattgttctagcaccaaaaggctctcttgtgctagcccattatagccactcccctttcttcccactatccctaactcctagtaaccacccatctgttctccatctctaattttatttcagaagtgtcatgtaagtgaaatctcacagggtataaatttttgagattggctgttttctcagcctaatttctttgagatccatttgttttgtgtatcgatagcttatttcttatattgctgagcaggatttcatcatatgcatgaatcagtttaactgttgaaggacatttgttctgattttgcaacatgacttttagttttttgggataaatgacttctgaggtctgaatgtttgtgttcccccagaatgcataggttaaaacttaacctccaatgtgatggtattaagaggtggggcctttggggagtgattatatcatgaggactcagcccttattaatgcaatttgtgccatcataaaagagaccagagggaccttgttcactccttctgccatgtgcagacacatggaaggcaccatctatgaggaatgggctttcaccagacattgaatctgctggtgccttgatcttggatttcccagtctccagaaccatgagcaataaatttctatcatttctaaattacctcgtctgtggtattcttgttatagtagcctgaatggactaagacagtacccaacagtacactgctatatcctattattataattgaatgtttagttttatgagaagctgacagaattttccagagtggttgtaccattttatgtttctatcagccatgtacaagtgatcccgattctcttcatccttgtcagcctttggtctgatatttatttttaattgtcactgtggccttggtttacatttcttcagtggctagtaatcttgagcatctttcaatgtgcttgtttgccttctgtatctcctctttgatgaaatatctctttgtttttcgcccattttttaataggattgtttgaattttttttttttttaactgctgagttttgagagttcattatatattccagacacaaggccttttttggatatgtagtttgcaaatactttcttctaggctgtagcttgtctttccctcctctaacaggttcttctgcagagaaaaagtttttcattttgatgatgtccagtttgacaatttttcctcttatgcttttggtgtgaagtctaaagacctttgtctactcccagactccaaagatttttttcctttttgttttccctacaagttttatagttttacatggaagtctatgattaattttgagtaaatttttgtataatgtgtgaggtttaggttgaaaggctcttcttctctttctcctcctttcctcctcccatgtttctctccctcctcccttgtcttcctgtccctcctctattaatgtccaattgctctagcaatattttagaaaagactgttttcctcccttgcatcacttttcacctctgttaaaaatcatttggggctgggcgtggtggctcacacctgtaatcccagcatttgggaggctgaggcaggcagatcacaaggtcaggagttcgagaccagcctgaccaacatggtgaaaccccatctctactaaaaatacaaaaattagttgggagtggtggcgcatgcctgtaatcccagctactcaggaggctgaggcgggagaatcgcttgaacccaggagtcggaggttgtagtgagccgagatcacgccattgcactccagcctgggcaacaagagcgaaaccccgcctcaaaaaaaaaattatttgggtatattggtgtgtgtctgtttccaggtcctctgttcctggcttggttgaactgtgtgatctctgtatccctcctcccacaccacattgtcttgatactgtagctacacagtaagtcttaacattgcctcctgatattctctaaagtaaatattatctgagatatttaggtaaataaggacccgagagagatgccagctctctgtaaactggtgcctataaccaagagttatttaggagctttggttcatctccagcttattctgagaaaatcagtaggaaaaccacaaagtaagtattcagaaaagtgaatatgagttaagtaataatttgacttgtaagtctaaagttctgtacagctgtctatgaagactggattgataatgaagtctagatcttcgggtttgtttgggtttgttagtaatagctattgatgatcaaaaaatccatatgagcaaaaggtttaagaaaaaggtagattctggattcattttaaaaagttagccactcgtttgcgtattttaagaaatctcacctgctttactgaagccttatatatattcttttatcttaagataatacagatactgcaccattttagacttagagaggcggtagaggtcaattcatttaaccatcacattttacaggtaggaaaatcagggcccttttataaatgggctggcacatctgcagattgtcctgggtcgctgggaaggtgggggaggctggcaggggttgaccagagtcagtctcaccagtggagactgtcagccttcttgcctggctgtaagcctgttttcactctttttcatctggcatggtcctgaagccaagggtagtggtgggcattactactacacagtactacacactatacaaaactatgcctctttccagctccctggaataggaacctgtgttcatagacctttgcctggaatcagactgaaataggctgtgctcactgggccttgcctattgtggattttggcttcccacttactggggtggagctgtctcttgtgcctcccagggactgactttgcatttcccttggctccctctccgtggctttgttcctcattttcatcaccagcctgctgctaggactggtcctgctgtggttatgttaacatcttctaaggtttacaccccaaccctaagaagtcatgttaaatcttacagaagagctactaacaatcaagggcatgaatattgctttctgaatttcactaatattggccagctccttttagagttgccctgaaacagagaaatttacagccaactgtaaatcagaaatgtcagtttgggccagtggagcaatattaatagattaatagattaatagcaagattaagagaataatctatatgtattttaaagtatactaatctataaataatagaattaaacttttattgttataatattggcttttggttatttttatcaggttttaaaaataaagatgctacataatagcaaattattactaaacatttatattggccacaactgtcataaatccagagtaatggaaggaattcctatttttgcctttggattttattttattttttttgtctcgaatttgccattgaaagaatttttgtgaactttccaatatgcatagtatatatcaagatacaataaattcaaaagaaataaaagaaaaaagaaacagtataagattaccaaaaaaggagtaattttgatttttacttttagaaagttttttttttaaagtcttatttttgtcagtgtctattcttggtatgttatttctgtaatttcttggttttgttcattattaagtgttatatagaactgtcattagaagcaggattgaaccccattggaagtgttttaatttcacgtctgaatttgagcaggctgttgaatattggtgggatggaatgtgaactgactgatcgcttttccaatcctgttattttccagtgtggtttggaaaaaaatctctacatatgaagtcaagaaagcacaatgaagccttctggttaatgaatttagtgagtttcagattttcctctcatggagagtcctggaaaatcacttcagaaaagagtgctgtgggtcacttatagaagaaactgctttgcatgaatatatgatttagagcattttaaaggctaacatggattctggcacagcctctgatggatagaatcaaaaccgattgattactggaccaagaattggaaacaaagccatttgatacagcttttaggtttatgactagtcagtcagatccctctcagacgtagctgctgaatgtagaagttcactggacacacgcatgtatttaccaaagcctgacaatgtctgagactgttgtgccttgactgtggcagtgatcacctgtaatgcaatttttcataacagttttgttgaggtataattcatataccatacaattcacctatttaagcatacagttcagtggtttcttatattgtgcatccatcactacagtcagtcttgaagtattttcatcacctacaaaactccatacccattagcagttacccctgattcccccacatctgcagcactaggccaccagtaatgtaccttctatctttagagagttgcttattctgtctggacatttcagtggaatcatatagtatgtggtattttgtgattgtcctcttaggataatttgtgtgtgtgtgtgtgtgtgtgtgtgtgtgtgtaagagtctctctctcttgcccaggctggagtacagtggcatgatcttggcttactgcaacctccacctcccaggttcaagcaattttcttgcctctgcttccggagtagctgggactacaggcatgtgccaccatgcccagccagtttctgtatttttagtagagagggggcttcaccatgttgaccaggctggtctcaaattcgtgacctcaggtgatctacccacctcggcctcccaaagtgttgggattataggcatgagccaccgcgcccggccttttagcgtaatttttaagggtatttgtagcgtgtgtcagttcttcatttttttgttgccagataatactgcagcatatggatatatcatactttattaatccattcatcaactgagaaacatttgggttgtttcccctttttggctattaatactgttgctatgagcatttgcgtgcaagtttttgggtgaacatatatttttattactcttgagtatatacctaggagtggaattgccaggccttatggtaactatatttaaccatttgaggaatggtcagactgttttccaaagcagctgtaccattttatcttcccaccagcagtgtatgagggttcctgatttcttcacattcttgtcaacacttggtattacctgttttttttttttttttttttgtgagacagaatctcgctctgcccccaggctggtgtgcagtggcgtgatctccgctcactgcaagctctgcctcccgggttcatgccattctcctgccttagcctcccgagtagctgggactacaggcacccgccaccacacccggctaattttttgtatttttagtaaaggctgggtttcaccatgttagccaggatcgtctcgatctcctgaccttgtgatccacccgcctcggcctcccaaagtacaattttaagtgttttttaattcctttgcattgttgatatttttcctgcaggggatcggcgttcacatacttaaggaagtagggcatggttagccgtgatacggctctatgctgtaatgaaattctgtgctaggaccagcttgcctatttgtctcttatcttgacttcagatcatagcactaaccaaaccaccatgataccacaagaataattattttagaagctcaaatctaatcttttaaatcttgagacatgtcacacatacataagaatgcataaaatatatgtataaggaataattgtagctgggcatggtggttcatgcctgtaattccagcactttgggaggctgaggcaggaagattgcttgaggccaggagtttgagaccagcctgggcaacaactctgtctatacaaaaagttttttaaaaaattaactgggcatgatggtgcacacctgtagtcctagctactttggaggctgagattagaggattacttgagcccaggagtttgaggctgcagtgagctatggttgtgccagtgcactccagcctgggcaacaaagcaagactgcatctcgtaaaaggagagagagaaaaaaaaaaaaaaagaattataaagcaaacacccatataacccacccacatcataaagtagaaatttacagttctaagtaacagttctaagtaacagttaataatgactgaaaatatgttagtactgtaaaccttaatcattaacaaattaaatcactttttgataatcattttccttttctttgtatcattttgcttttctttatagttttgctgtgtgtacaaacacgcctgcacgcacacacgcatccagccctgctaccccaaagcatgaggttgaagttgcctgtttttgaacttcacataaatatgtattcttcagtgacttcttttgtttaacatttcaaagatattgtgggagctgttcattcatttttttctttttttcttttttgctactttttttttctagttttttttttttttttctactgtcttttttgtagttttctagcttctgtattctcctgatgaacatttaggttgtttctgatatttgggtattatgagcagggctgctatgaatattcttgcggatattttcaggtctgtaagagtttcttcaaaatagttaccaaggagtagaattactgctttcctatataatgccagagtcttttaaaaaatgttgtaatgttttctcccacagcattaccagcttttggtatgttcagactttgagcagttttgacagtctgttggttgcttctgtagcagtagctcattgtggtttaaatttaatctcacttgagttttattattacttttacattttcacccagtgcatttgcagttacagatttttttattttctcaaagaaaagtggacattgggctacctgaaaatcatatttgggctagtgaaaattcattgagatagtagcattctttaggttattctaactgaaaacttgatctcttagatgatgagtactgtcagattatttttgatcctatggttttaatctggccttatacattttcgtataataaaatttaaaatttatggaattgcttatttagtttaccagcttgatatgctataagcaataagtctgtagtttgctaatactgattctaagcccaatatataaattgtcatttatttatggtgaattaagtatttatccctaagaggaaattagaacatctagttcaaaatattctcagtattagaaagtaataactatatgtgtgtgtgcatgagtgtatcagagtgtacatgtgggccaaagtgctgaaagatggggcattttttggccgggcgtggtggctcacgcctgtaatcccagcactctgggaggccagggcgggcagatcacgaggtcaggagatcgagaccatcctggctaacacagtgaaaccctgtctgtactaaaaaatacaaaaaattagctggccgtagtggcgggcgcctgtagtcccagctactcgggaggctgaggcagcagaatgacgtcaacctgggaggcagagcttgcagtgagccgagatctcgccactgcactccagcctgggcgacagagcgagactccatctcaaaaaaaaaaaaaaaaaaaaaagcgtacccaaaagtcaattctgtatgtcaattaatttttttgttggtggagagggagtactttcaaggaagagtgaattaagcagattcttttgttggcactgggaatctaaatgggattgctgaatagctttacattttttttgttttggttttgtaattgaatatgttttataccaaaatatactttattgttccatgaatatattgaataattgcaatatcttataaactcactctgtattgaattttcatactgtagattgaattttcatggtgtactatacagagtatagaagtgagtttttgtttttaactacatgaaatctcagttctaaggtcaataaatttacttctgtttcccacaagtaagatcccattatagaaatcatctcaaaagatgtccacattaaagaataatgtttataagtaattaccaaaatgagaaactgccagacattatttacttgtatgacacgaatgttcactctcttgaattttcctataatattcataataattacattagattcagaaattcaggaatatttcaacatatatatgtactagaaaataccttagttatcagaagggattgtttcattttgttcttttaacaagggcttgtttttattcttttgagaatatttgtttcttaggtaaatgggagctaatcttttatgcatgaaggacctaaagcgctctgatttatattaataaatatattgacaatttaggaaacatagaatcctttatacttttcctactagagaagaagagtagtcttctgcaaatttgctttacattggtgaaaaatgtcatcatttcaaagccactcatttcatctgaattatgagggccaccatcttatagctgggcttctgaaccttttatttctcccagtatatattggactattttgatcactgctatatgcttctagttgctcaatcagtatctgccacagaggaggccctctaaattttttgttgaattacttaatgaaatgaatgagtgattatttgccctcacaggattgtgtgaaaccatataaggtttgtagagcggtttgacctcccaccattgaaatgctccttaccattaccatccgaagtgattcacttgaggaatgtgtgtgctttttgtcacggtctgcttgttccagccttgctggaatctagatccacgagaatcctgtgttcatttttttctaaagaataattacgaccgtctaaggtaacagctaaagaatcgagacctgtaagaactcttagccaggcacagtgacctgtgcctgtagtcccagctactcaggaggctaaggtgggaggatcacttgaacccaggagtttgaggctgcagtgccctatgatcgtgtctgtgcatagccactgcactacagcctgggcaacatagggagggagacctcgcctctggaaaaacaaacaactcttggcagtttcctaataacctattcaaatagttcagaatttggcaggggttggcggggaggagggtccatttatctctgttcctgttcatatctttgccagagaagataattttaaaaaagaaaatgttgttgtcatttgcttttctacaaaagaagcacatttagatagtgaaggaaaggtgaaaagtattctttatgccatttacattgtctcagttatcccagtagcactgcaaggttggaatagtgactagcctgttttatagatagggaaaccaaagctcttaaatactgtgttatttgtaccctagaatatacacttcggggccgggtgcagtggctcacgcctataatcccagcactttggtaggctgaggcgggcagatcacctgaggtcaggagttcgagaccagcctggccaacatggtgaaactccatctctactaaaaataaaaaagttagccaggtgtgttggtacgcacccgtagtcccagctatttgggaggctgacgcatgagaattgcttgaacccagggggcagaggttgcagtgagccaagatggcaccactacactccagcctgggcaacaaaatgagactgtctcaaaaaaatacatactcaggccgggcgcggtggctcacgcctgtaatcccagcactttgggaggccgaggcaggcagatcgtgaggtcaggagattgagaccaccctggccaacatggtaaaaccccatctccactaaaaatataaaaattagctggtcgtggtggcgtgcgcctgtagtccctgctacttggcagtctgaggcaggagaattgcttgaacctgggaggcagaggttgcagggagccgagatcgcaccattgcactccagcctgggcaacggagcaagactccatctcaaaaaaaaagtatatatatgtatacacacacacacacacacacacactccaggagggttgcagtttcactggttctcccttgtgtcttcgtataaagcatgctgtgctggcacgtggatatactgattggttttactttttcctaagagaacatggctggttaatggaatctgctgagatttgcatgtagtttttaccccttccacagcctataagctcttttcactgcagtgctttttaagttttctaaggcaggggaccccagcctctgggccatggatggtacctgtctgtggcgtgttaggaactaagctgcacagcaggaggagagtggcaggcaagcaagcattaccacctgagctctgcctcctgtcagatcggcagtggcattagactctcataggagcacaaaccctattgtgaacttcgcatgtgagggatctaggttgcatgctccttataaaaatctaatgcctgataatctgaggtggaacaatttcatcccaaagccctgccatcctgtcacatccatgggataaattgtcttccacaaaacctgtccctggtgccaaaaaggtttgggaccactgttctgagattgtttcgagttacacatctctggaaaagtggacatattccagtggcgtttacctagcagctgttttaatgcagtgatgtaggtcttttctctatacagaacatgctgatgctgatgactgtattctttggcagctcatagtatgagcatataataaatcttatgtatgcactttttaccctcattttccaaattgttatatttagttagtgaaagcaactagaaaaaagtaaaaccgataccagctgttatacatattgccatatcccagcatgatttgctcctatgagcctggtggtcacatatagcagtctgcctttcctgctctcctactcatcttataaaaagactctaccagattagccctattttcttttattctgatttctgctattttgaagttgtgggaaccagagaaggagttcatatttctctaccattctatggcacctttgccctagtaggatggagtagaactgagctgacatgtcagtggtacgctggtgatagcttctactgcatgtaagaactgatggttaaattttcagactttttctatgagcggttgttaaacatagtcattgttaaatgttaaaatatacaagcttacaagttaaattatatttaataactgttaataatatgctcatcacttcctgttcttttaagtgttgctatatgtctatgcttttaacgtttttaacatgtctttgtgatggaaatactgtgctgctgcgtatctttttcttttactttttttttttttttaattgagatggagtctctgtcacccaggctggagtacagtgttgcgatctcagctcactgcaacctccgcctcccgggttcaagtggttctcctgcatcagcctcccgagtagctgggactacaggcgcccgccaccacgcccggctaatttttgtgtttttagtacagacggggtttcaccatgttagccaggctgatcttgaactcctgacctcagatgatctgcctgcctcagcctctcaaagcgctgagattataggcatgagccactgtgcccagcctgtgtatctttttctaattctgcattccatgatgttgtgttgttgggttgaaattggccatggtgggaatttttataccaaggaaactggtaaacattacaatccaggtctctgtcccccactctgtttttcccagtagagctggttgatagatatttaccacgacatgcccaatgggatacctacaaatggggaggcgattgaatactgccatcttttgtgttgttgggttatctctatatttaaccatagtgagaggaagaaagagctaggagatagggagacaacagtgaggaagaattgaggcacagaggaaggtcttagtatagaaataaatcgaactctcataatgtttatggtgaaactacgatttgttagatagttggtgtttttggttattcttagaaagttttaattagatacacctttataaacccgtaattacccaatacctgcctcttagctaaaagccttttataataatcatttagccttttatgtgtaaatgttactgcatatacgcagttctagaataatttcataaagttttagggtttggggggcagagttgcttctgagatgagttttgatctttcacttatttttagtcacctggtggtagtctgcgtgtgtctgtataatgaataatggagcatttcataacttagttccacttgtagatacttttacatgggcctcactgttttaagagctaagctagattgctcaagtgtttttccctctcctaccttgacataaaagttttgtctgtgtcagacatttgtattttcagccacaccccagagtgcatcactgatgtttgaggttcttcaccggcaaggccaggtcagcactcagtcatgtctgtccgaaaggtctttgaacccttggaggacgtggaatgccatgttgacctcgatgccaacaggggcataatcgagcccaccagaggagcaagtgaaggggttgcctgaacagggctttggaagtcctgcagccatctgcagaatgatctttgctgagtgaggcctgcctgtagaagctaactggtatgtctggtagtggagggattggacagtgtagtcagtaacaagatactaagataaatgcagggtttaactgcttcctagagtaatgttttttaagctggctagttttgtttactgcaggaattaggtaactttgttggagtgcaaccttgaagagcagtggagatgagtcagacgtcctgcctacttaaccagtatcaagtaattgaaaaccactccatggatggggcagaaaaaccttcatacggggactgactttatgatactcatacttttcaaagagtgggctgcattgacttggtctcgttgggaagcatgcctcctaccagtgagtgataaaagctgcacaggtgcctagcaggttgctctgctgcattcacttacactggatgagttactttgttccccatttggaaagctgactgttcttattcctgtttaaacagctctttataaaaatttttatgtgtctttacattttatgcttgccacaaagaaggacattcatcgcttgattaaacttaaaataggatttttaaaactaagagaacctaaaagtctctcttgatgccaacatatcaatttaagccactgcaactgtggtttctgtcccgtcccctgctgttttacacagaactggcttcatactgaggtttgcgatttacctgtcttctagtggaactcctaacattccaatctattttttgtttgtttgtttgtttgtttaaatttcattatctgtgttatttaaaaggtatattaaaaatgtaagcaaagttcttatcctccctaccccctagtttttattgaaaatataactgtgagcccacaggggaaaattatttcctaattgtataaagattcctgcaacattttccttccaaggaatttggcagtacctcctctgttactcctagttgagtatagaatatttgggattgtggacaggtcatatgtttgtttctctccttcccctgtgctcccctttgcccaagtcaacaagccatggttgccaggaggctcttgggccaaagcaggacttcactttgctgtgatagtggttggggaccaggaagatgagcaagaataaatttgtaagcaactgaatttgcaagcaatgtattgattgcaaatgaattatttcttacatccctgtagttgtccccaatctccattccaataggatccctggagctgactgggagaaaagagatacctgattggtacccctcctacctgttccagtagccaggtgggcttggcagagaatatgaaaggggcatgccacaagtggattgaggctggggggaatattataaagaaatagggttgtatattgtttctactccttttgcgtggttgtcttctccaagctgcctagataagtctgcagaagggctcagatgaaacatgttttgtaaatgtaactttcaggtaatgaaacagtactttcccattattgagctctctttttaaatagctagttttgagttgaaatcaagacaatagatattcattatgcaaacctttgagccacctttatggtattactgtcttagtattgctgtaatgttaaatgtcttctctgtttactgtaagataaaacctttgtgttcagtcggaaaataaagggactgcttggaggactttggcaggggctgcatgatgatatgtggctgagacctatatacaaaggccttctgtgcagggtctatgtggccctacaaaggcggtaagctgagctgagaggggaagcctacagaaatggaaagtggaggttcctgtgtccattatttcaaactgaagttgctcctttatttagaaaacaaagcaacatgccagacaagtacataaacatttcatgtaattatattaagataggcttggaaagtgctgatggaggctttaaaaacacctggttcaaaagcatgtatttatcttctctgaaattaactggtgttaaatgtcatttacagtctagtgtgcacacttcttatttagcacaaaatcccacttcatttttgttttttcctttttgtagatgtggcacatattactactggaaactttgatgcctagtatttttttctctattctttttgtaaaagaatgggatatctttttaaaactctgtttgcacacaggcataaacagggaacacagtattgatggagatggggttgggggaggtttagagggaggaattgcattcttttggcattcctgagaggaaaacagctgtattaacgttttttttttttttttttttggaaagtgcagaggcatctcccctgactctcagaattccagttctttacagctgagcacaaacagcatggcatattatttatgcctggagtcagcatgcatgaatgttgcagttctgattattagccaagagaaaacagctatatacattactaatggaaggactttgaaatgaaaaaaaaatccaatagtggggttttcccctataaacagatgtgtacagggttttaccccacgtctgccctgtactttagcaccactgtcctgggacgtaaggaagccagcatgagaggtggaagtatggtgaaagtagatatgtttatagcaaaataggtatgctgtggttgactagagacattttaaggtttattattttaagagagcagttgtgcctagccatcattccattcctcctccttcgcctctcataaaaagaaaatattgcgtgcctgcaaacatatgctctgctatcagcgttcagacacccaaacaccgaaatcatttagcagctcttactgctgtcactaagtaggtgatggcgtaagggatttagaatttggtatgtgttttctagagcatctctcaaaataggcattgtctatttgttgtttgtttgttgcccgtgggaaatcttctgtcaagtgtacctaacccatgaccaaaacttatctagatctcaatttctagattaagaaagaagaaaaaagggatcaagtaaggaatagctaagtaaagactatctaagattaaaagtaggaatagctagaattacttagatttttatttctgggttatttttagtgtgacaaaacagtggccaaaattacaaatctgagggataattcaaagatccttttttgttgtcgttgttcctgggggaatatgtttcctggggaaaggagcatatctgactggtcccggggaagaaatgaagtagactggtattgaagagataactttctgtgggaacccagcaaaaatattgggttccaagagcttgcctgggaaattcccagattctttaaaaaccttacatataggccgggcgcggtggctcaagcctgtaatcccagcactttgggaggccgagacgggcggatcatgaagtcaggagatcgagtccatcctggctaacccagtgaaaccccgtctctactaaaaaaatacaaaaaactagctgggcgaggtggcgggcgcctgtagtcccagctactcgggaggctgaggcaggagaatggcgtaaacccgagaggcggagcttgcagtgagctgagatccggccactgcactccagcctgggcgacagagcgagactctgtctcaaatacataggtttagacataccggttgatatttcagtgcctatttttatacgcatttatattgctcaggtcatctgttttccacttgttctattaagtcatggttttgcaaatggtcacaatttaaatataagggatctgtttctcttctttctttcatattcttcaacatttcttcaatgaaataaaaggaaagtttaggagtgagttgcttagggtgtattatactctgaggatttcagttttactatggctgtatttaatcttatattaattgggcacttacattaatttaatgcctgtataatgttggcactgaaatggttctttagtttgttgtgagaaaatttcaatgaagtcatttatagaaaactatttttctcaagagaatttccctttccccttttcagaagtcggaaggaaaaaaaccctggaattagaatatagagttagagataaagtgagatgatggcagaatatgctgagacatttgctcgggggttaaaagacagggagtttatagaattccgtttttgcttgtcataaggttatctgttccttcttttggacatctccctagaggtgttcccaagctttgtatcacagattcttttatcgcgggggtcctaaactttactgtaaccatttaaaaataaaaactaagagttaccaaacaccttaatagagacttctctatgaagttacaagaagtaaacaaccatatggaagaatttcgatgtgttctttgaagccactgcttgtatgagaaaacttaacttgtaatttttgagttaccgtatgactcatgttggaaatgtttaaagtcttctgtaggcatggtgttgtggctcatgcctgtaatcccagcactttgggaggccgaggtgggaggatcacttgcacttaggagttcgagaccagcctgggcaacataatgagactttgtctcttaaaaaaaaaaaaaaaaaaaaaatagccaggcatagtggtgcatacctgtagtcccggctactcaggaggctgaggtgggaggatctcttgagtctgggatgtcaagactgtttgagttgtgattgtggcactgtgctcccgcctgggcaacagaggaagaccctgcctgggggggaaaagcctcccgatgtcctaggaatagagggcttttgctgttgcaggagtactgaaatggaatagtaggagctgccaatgaaactcactcaatgttgatatagcatgtttcaggaatgtgttatttacagggaaaactcttgagttcatcagcgaactgagaatccattcatgggtgcagaaaaagatgcccattgggggaaatgtttctgtactctgtggcacctcctcaggcgggaggaatgtggtgggggctgtgaagactgtgccactttcacacctctgcatgcagaatgactcccattctcttttaccaaagagcgaattcattattcaacctgttaggatccaaggcattcaagcgtatttggggaagactactcttgttctctagagagacaggtttaaatgattaagtttccaaatactgagcttattccagaaataatttggtttctgcattctttgttttctacagcatggtgagactgccacttagttagactgagtcttgtggattgaagcctgtttacaagaagtctgacatacacactattatttttagcctgaacaacatgaaaaccatctatttaaaactcccaaatctgaatgacagtctcatcttgcttaaaattccttctagtactttttaagccaacagaaaggaaaatataaacagtttgttaattgcaacagctggtccctgagtatctttatgttaatgtttggaatctttggatttgaaagactttcagaaagagcatctggattaatgtactgctattcaggcttcagtcttgagaagtggaattgacctcatcaagacaaacaaacaagggtcttatacagattgggagggcaactgcaaaggcatggtgaaatttctttaaaatcttagtagagagaatgaagacaaatggtctcggtttcgttgtgggtgaataacctcttatttaatttagtatgatgtttatctagctgctgtggtaaatgaggtgaagtcttttgtgtatatagttaattcccaattattcatacatgctttagccaaattgctgattctctatggactttggagaccttctccgcccccatacaatttgctgtccatcggtcccatgtcctagtttcctctctggccatgctttctcacaggggttcccagttgctctcctcatttccatctttgctccctgaccacaccgctgctgcttttgctttcttggctgcattccctggatttgtctgacagtctagggttcttgtctcttagtcatctcagagtggtaatagagaagctagttgatggccagggagaagctatagagagataatgcctgctgctccttgtttctcttcctgtcacctttgggcctttgctgaatgaacaaatggagagtaagtagagaaaggggtttcctgaaacatttccagtctgttcttttaagtgctttttttcctcaggattttatagtcctatacatggtaggtaggtgggtgggcgggtactaggggaggtattacagcgaaatgcttacatattcttttcatcccttgtttccttgtttgttctcaactgggacctattctcctccccattgctgaaaggcaaattattagaaaggggccatttagagtatgtgtttctgaagaacctcacatagtttttaatttcttgagttctttttatgttttgaatactcttagagatatgaaaataaatttgatgtagattctgccactaaaagagtttaagtaaaatctagaagcggaatttatacaaccacacagaaaaccctaaatctgaagccgatgtgtaaacacatgattatcataaagtgagaaacttgtaccatgttggggaagtgtgaaggatctcccggaagacactgtttttccaggggaggcggccagagtagtacagatgtgaagaatctgccctaatattttttgtttgcactaggtggctggaaatgaaaacttacccataacaaatagttttatctatagaatggtttacaaacctgtttttgttttttgtttttttttattatatgtctacatagagtattaatttcccccaacaggtgaaagctcagtataggtatgcaggccccacttggctaaaatattggttagagtaataaaatcctgtgttccattcccaaaccagttccaagccaggtaattggttgaaaaggcctttaattagccggttggttttcatataaaccaactctaaagcactcatgcattgaactcatagaagagcccttcattcgctcaccagaccctggtgtcgcttaatctttcagtagttccactaaagcttttggtttctgagcccaaatgagattaaaaccagcaaattttaaagaagtggagctaagagagactagtatagtaacaacaagtctgaaaaactgcgagaggacacaagaattctgagtgagcctggtagtttctggtgagatttccagttaaagttttgatacttagccttccatggactatctcagatcattctttggattcataaagtatttttgttagtctccttgaaatagccaaataaaattaatctctgaattgagttaggaaatttagttcctgctacaactgcagatttcatgtgcaggaagaggaaggagtaggcaattatagaggattagggaacatccctttggagttcttcctgggatgacaatggtcaaatgagataatgtgagagtgctttgcagttggaaagtgcaataggaactctgagttcatctgaaactgtagctcagtgtttaaatgatgtctgttattacttttttgaatagtctggagtgcttgttaaaggagaaattattctatgatatttgttgaatgaagcacaatgaggaagactttattcagggccattgtaatagctgtagggaccctgcagtagggtcttgcagtgggggagagcgaatgggctcaattctgaatacatcgtcatgggcaagtgggaatttattagccatggagcagtgtggggatcagtagatggaaaattactaagacaaaaacctcaggggtaaggggggttctgactcaattgccctaataggattcttggtgaagacaggccagggtgttgagacattcattacctggggagatggtggaggatgaggaacttgatcagatattggagatgatcagatattgagggtggagggttctgaaactgacttaacaggattctttgctaaaaccagattctacaaggaaatacacatataggcctagcagaagatacagaacactaactgaagtttggccaaccaaagaatctttgttactgaatcaggaactctgaagacaaagatgtcagaatctacgttgttataacagactccctgggcatttcttttacacattacattagaactacgtagatagaagttgcaactttttggagtttgagtttgcagttgtaaaactttgctttttggtagaaggtgagtatgaatgtggtatttcaattagagtgggccacattgtaactaggtgaagggacatctattctgtcttggaaatagagatggaaagattcatgtcttgaaagcttatattgtgttatatttaattttcttatatgataaaatttaccaaatagctccgaggaacgtatcattttcaccatttttttttttttttttgcacaggggcaagttgaagcttattagaaaggaactttttccttttttaaaattttttaagttctgggatatatttgcaaaatgtgcaggtttattacgtaggtaaatgtgtgccatggtggtttgctgcaccttatcaacctatcacctaggttagcattagctatttgtcctaatgctctccctcccctcacccctgcccctgacaggccccagtgtatgttgttccctgtcctgtgtccatgtgttctcattgttcaactgccacttatgagtgagaacatgcagtgtttggttttctgttcctctgttagtttgctcaggatgatggtttccaccttcatccatgtcccttcaaaggatatgatctcattcctttttatggctgcacagtattccatggtgtatatgtattacatttagaaaggaactttcttaggaccatacaactggttgtggaaggagcagaaattgaacactggcctgtctgggtctgaagcccaagctcttggcctccatccactctgaattgcctagtgctaatggtcgcagtcatcagggaatagaggttaagggaggagaggcaggcagaggctaaagtgtcactccagctgtgggctaaaggatgctgacccgtggacattagcccaaaccccagcaaacccattaggcatgatccactactatgtaagtttaaggcctgggagacatttgtaggaagctggttgctgtcactgagagctcatatattgactttgtcaagcaagagtgagaagaaaagatcacatgttttacttaaaattgccgtaaacttttcataagacttttcaaatcaatactcatgctttttctttccgtattgtaagacactcagactggtaagtgaagggacttcaaagcttggcagtggtttagggctgtagctgtgggagtagcaggaaaagatgggaggagagaaaagcaagagagctggacacatgtggacgctcagccagggcatccctggaaccccacattcttgagattttattatgtctcaggactaaatatatgtggagggagtgacagtaaaggtgataaaagtacaagttataatagaatttcatagatagggaaaattggaggaagcacaatgtagtttatgggtaaaaagcctgtgccacattctgagagcttcagggtcttttttgtccatactatccccttcagcgcctccacatacccagggagtaagctctagtatttttgattttcctatttctgccttgtaattaaatatgaataccatattggccagaaaattcgtttgtctttaaattatggatttgaagaggtttactctcttttgctattccatagaggttagtaggccacagggcctctttatatctcattcattcattcattcattcattcattcggggatggagtctcactttgttgcccaggctggagtgcagtggtgcaatctcagcccaccgcaacgtccgtctcccgagttcaagcgattctcctgcctcagcctcccgaacagctgggattacaggcacgcgccaccacgcctggctaatgttggtctttttggtagagatggggttttcaccatgttggccaggcagaactcctgacctcaggtgatctgcccgcctcagcctcccaaagtgctgagattacaggtttgagccaccatgcctggccaggcctctttataactattgtgctcaaggtaaatatagaatgtagaaattaaggcaaataaaacattcatattaaaagcaaaacattaattttgtatgttcaggatatatggtatgaactggtacacctgggctttgagccacaccttccctgtctataacacacacaaactcactctatcccctcccccaccacctccgacctccacaccctaactgtaaaactcgaggctgggcatggtggctcatacctgtaattgcagtactttgataagccaaggtggaagcatcacttgagcccaggagtttgatgttagcttgggcaacatggcaagactccgtctctacaaaaaatacaaaaagttagctgggcatggtggcgagtgcctatagacccagctacttgggatgctgaggtaggacgatcatttgagtccaggaggtggaggctgtaatgagcccagatgatgtcactgcactccagcccgggcaacagagtgaggccctgtctcaaaaaaaaaaaaaaaaaaaaaaaaaaaaaaaaaaagtttagacaggtaattttactgggtcttagtttcgtttcttcatctgtctgatgaggcgtgtggctcagtgacctctttggggtttttacatttcacagtcgtctaccatagtttactggtgacctggaccagcctcaccctgacctaatgattcatacaaacatttctcttcttctcttcatgtttgcatattttgattgcatttgtaccttggacttagtggggtcactggcaaagtaagtgtattttctgaaatacactggagaagtgggtgtgcacagtgttttcccttgggtccagtcatgcttctgctgtccttccagctggaatctgtcagatgtggactgtggatctcctgaagtgcttggtaaaaatgcagaatcctgggccccttgcagacctagtgagggggaatccctggaagtgagggggaatccctggaagtaaggctctgggatctgcattttaataagcacctaagtgatccccgggctcactactgtttgagaacatgaatgattctcctctgagtatgtgctgtggtctttagatagaacccagggttccctcaaggctgtgtgtgtgtttataaattaaacttctcagaataaattgtgatcatctagtttattcactcatgtaacaaatacttgcatgcttcttttatacaaagtcctgtgttagttgtgggaatggagagaagggaatatatctgaggtggcagagcagacagattttggcagctgactggatataagggagaggtcaaagttagctagtaggtttgatcctgagtgtgggactgtagtggtaccattacagaaatgagcagacaggcattggaacagttttgagaggaaagatgcccatacgggaaagagcccatagaatggttgtaaaatgtgcctggatttgtggaactagttctaaagttggcattactttcagattcttagtatcttagagttgagtgtgatcttgtagatcctatttcagtctcctcagaagcggggggaaattggtatcatttggaagctattgtttagggtggggcaaaaaaatataacgggggaagacattatatataaaggtgatatttacttcttagatttgaaagaagctggctttcttaataatctctaactgattttgaacctctaccagaataagccctggaaataatatttgaaatgatataggcattctaagtagatatattcatttgacatttaaaaaagtatgacggcccggtgtgatggctcatacctgtaatcccggcactttgggaggccaaggcaggtggctggatctcttgagctcagcagttcgagaccagcctggacaacatgacgaaaccctgtctctaccaaaaatacaaaaaattggctgggcgtagtggcgtgtggtcccagctactcaggaggctgaggtgggaggatcactggaacctgtgaagtcaaggctgcagtgagctatgatcacagcactgtactccagagctaggtgacagagtgagactgtctccaaaaaaaaaagcctttagaatttactgtcttgtggtcaagtagaatgttggctcgtcttcttcaaagacagcgtttctctcccgattgcccttaaactaaggaggagggaagtattaagattttcagtgggaggctgggcgcagtggctcatgcctgtaatcccggcactttgggaggccgaggcgggcggatcatgaggtcacaagattgagaccagcctgaccaacatagtgaaaccccatctctactaaaaatacaaaaattagctgggcgtggtggcgcacacctgtagtcccagctacctgggcgactgaggcaggagaattgcttgaacccaggatgcggaggttgcagtgagccgagatcgcaccattgcattccagcctggtgacagagcaagacttcatctcaaaaaaaaaaaaaaaaaaaaaagagattttcagtgggagcacagactactactcactcactgagtggatttcattatgtagtttcagagtgtttcccagactgcttgacaaatgaaggatgtacgttattgctttttccttactttggcctgagaatgatgcaaagcaggcctgttgagttaccaagcatcttgggatgctgcacttagtaataggctttcagtatgtgttcccttgtcaacagcagtgactatgcccaggaatcagcattgaattgtttttgcaacttgtgggggtgacttcctattgtcccaccagaatcagcaaggtaagttgggagaaatcctttgtcagcaggatgggaagcagcaagtgaaggctgggctcagttgagaacaattctaggagctggcgtgttcacaggaaggatagagaacacggaggtcaggaagaggcataagttaggctggtggccatccggggtcttctcacattagcagctggagagccaaggctgaaggttgagtcataagtggccagccttgtgaatgtggtatgccagacaccagcagaacttcctgaagctgggagtttcctggggtcttcctgatgtgtcagaactgatgatcaggaccttacaggttatgtgtctattttgggtgtctgctctgacagggcagtggtggtgtggtagatacacttttgccagaggtatttgctaggtgagtgggcaagatgtgatttgtattgggtgtaatactcaatccagcagtgcttctctgctgcagtcaagtccagactgcaggaacctgttaaaagcaggggattccaacctagaatcttaagaagtttctctgctttgaacgtatcctccatgtttttcatgtccgcagaagtcaaaatgcagtgatacatggagtaaattttcagctctcttatcataggatttgtttaatttggtactgggatgtaatgaacttgaggtgtgtgaatgagaaatggagaggaagtgttttattagtttagaaaagggggtataaaggaactctgagtgcagcacgaagctttcagctctgaaatttcacctttctaccacactagcagcagaaaaattgcagaaagctgattgtgttgtctatttggcaagtcaaagcaagatacggcaagctaagagatgagtctcctagattgctttcactttctgtgacatgaaatttctaaaaataagaaataaggagcccctgggcagttgctctttagaatttgtgtggacagatccaggtcatccttgttcttctttgtgcttttggtgaagtgagactttctgattagtgagccagaaatttcatctgacagcttttaagtttgatgatttaaaaacacaattgatgataaaaattttaaatttatcatttccggtaaagtaggaaatgaaattacccttttgctcccaatttcatttccagaggtttatatttaccatgtactaaaacttaccatttctcatctactttataaatgaatgaaaaactccgattttgtacttcttttgctctgtgtcattaatgtgatttgcttcacttaatttcatgtccagtatggctcttgagagagagggaactttgtcagaatgagtgtatcattttaatccacttccggttgttgttggaaacacagttaagttgcttcctggtcttactgctgctttgctctatgagaaaatgcaatccgtttgtcttcaggtaacactgcatttctttcagtcttctgagacagttcatgttttcacttatccaggtgttggctaattttacatagccgcttatatgcctggtctgttcttgactaagataacctgttgaagcattattgaattcaactatattataaaattatgaaactgtaggcgggatgtgttttcttcctttctcacgtagcctcccttccatgctggaaatggaagacttgacgtgccatcatttgataggtctgatgacttcccagtatttcaaccagtaatattgagactagggcttcttgttccccctgtcctgaagtttggcataatgatttgcattaatatgactagcttttattcatttttactctatgccaggtacatagctagctgtgtaacctcctcctgatccccagaattactttaggaggtgtaggtgctgttatttaaaacacagaggaagaaatggaggaataagtaaataacgataagcaattaaaaagtaaatacaagtaaaaaatgaatattaggtaatttgcctgcaactatgaagagctatgaagtgatggggtggagatttgtccagaggcccccgttctcctcaaagccctattaatctctgcactctgctgctgcttgtacccttttactcttgttcttttactcagctcgtattaatgagcactcacgttgccaggcatggttctgggtgctgagaagacagcagcaaacagaactgacaatgaagaaagagttaaacaaataaacatataccagaggaggtgatggcgatcaagaaaatactaggtaagagagagggagggtatgctttctggcaaaactcataaaaatatgagaaaccattctagtcattgattctatttaaacagcctaggacagtatgaagaaaaggcaagagttgagcggaaaaaataaatcagccctaaaaacaaacaacttcctcaaatccaggacctatcaagtttcatatcttcattgaaatggtgacaaatggtgtatcagtgtgaaaaccagaaaggctaattgtttgtatacctcacaggggagtgtgtgaccatccaggagggaaatgtgaaggaggttaagatttaaatgttggaaacaccaacattctaattattcctgagtttcaacaccagtcattcaagtaacagttgtaaggaattttcttttggaattttccttttcctttagattctcccctttctttcaggatggggtggggtgggggaggggagcaaaaatccctaggaatattgtaaaaatattcaccaagaaccactaattagcagagatcttttcttgtttcccttttgataattcccacaaatgaactttttaagattcagaagcaaagaaaaaggaaaaagacccaaaatacaaacattaagaaggaatattctgaccactttggaagtcaccgtcttaagtgctgaaaaattatctattaaaaatatttttcaagagggtagatgaaagccattgctatttgccatttagaaattgtgttttcatcaaagactgttgtcatgaacattggtctattaataacactgaaccatctccactccatcatccatttggtttggttctggcaagtttataactcctttcacatgaatacaaatttttcatttagaaaaggttggaaaaaggatttcccatttctttcagctagatagacttaaaaagcatcctgacccctttctggcccctcattttctttccactgtatccactgattggcctgatagcctgaaaattgattagagggaagcgatccagatagacttggaaaacacttaatcctgtgcatggcctcacctctgaaaaattgcgtgcactataaaccagagcatttcagcttcttaaaacatgcatttttacacgggggaagctagagacattgagttcttctacagaatgtatctaccctattttcaagtttttaagattgggagagttcttttgcagaggtctatttcctattgagatttcaaaaggaatgttttgattttaaaaacttacaagcaaaacttaattccttgctgtttacaatatgtcatgatatcttgtatttttatttagaatatgtttatcataggaaaatgtactgttgccagaaaacaggccaatggaatctgtgaattttgtattggtgatttagtttattacaaagaaaactaatttgtctgatgtattcactgtgctttttaattatgaggaaattatactgcactactttaatgtagacttttcgttttctttgccactctcaaattcagtccagtaagtgtactgaattttcaccaaatggctagctctgggagctgtcactgatttaggggaccacactttctactttgcttgtggattaagatgtaaaaagaccagataataaaaaggagagtgaatataattggcaaaaagatgattatagatcttacaagcatctcaagtgagagaggttagaagaggaagagagaagtgaaagctgaagtagggatttcaaaaatcgggaagcttaatggatttttatgaattaagcattcttagaaatccttatatcactcccctcctccatcagtagaacaaaagcttttttctcttatgatgctctgcctactatagtttttttttcgtgtatagaaactggaaaaataaataattgggtttatcactgttgatgtctaaataaactttgggattacaagtgcttttctcctcaccctcataacattttgtaagaaaagaactgccaatttggggtttgagcttgttcctctaaaagcaggggaaatacttgctttattagttcagttgaaaatttaaagatttgtggtaggacacattcatgggtgacttcatagaagaccaccacggactcagtgggtacccctacagtctgggaaaagcctgacaaactctataaacctaagctgaggtagaaaacacacgtgccatttccccaaatttctggtttctagtgtcttggcattctggtatttttacttttattttataaatcctataccagcattttaaaaaatgaagaaaatgggaagaaaatcatggaaattttgagtaccttcttatcttcattgtttgtctcttaacagatgaggtggtgaagactgtggttgaagatttttttcacctcatctttttttccgccaccttgttctctgtcatgtttcatgacctgtgtcatagatatttcttcattacgagcacttcgctgtgtggcttttcaatgtttaaagtggattaagtaatgagcacttcactgtgtggcttttcaatgtttgaagtggattaagcggctcacagtcagttctgtgacttgagtttcaaaagtaaaattgccatcaacaatgtgattcaactttattttctgtagtagctaaaagcaaggaactatattattaacaatcttggctttactgtagtttaaggcgggtgatgatgatgcttgttagtccacctggaagagtccttccaggtttttgtaagctttattgctgcttattaccttgcccttaagaagtccttcatggactgtatttgctccagatgtatgagacaagtttatggcaaaaagtgaaaacactgggttgacttcttttccccatatcctagttgaaagggacagctatatgcatgttagattgtccaaaagtgtttgtggaacctcattttgactgggtgcgatgactcatgcctgtaatcccatcactttgggaggctgaggcaggcggatcatgaggtcaggagaccaagaccatcctggccaacatggtgaaaccccatctctattaaaaatacaaaaattagctgggtgtggtggcgcttgcctgtaatcccagctactcgggaggctgaggcaggagaatcgcttgaaccagggagtcggaggttacagtgagctgagatcatgccactgcactccagcctgggcaacagagcgagattccgtctcaaaacaaaacaaaacaacaagaaaacccacaaaaaacaaaacaactgtattgtactttttaaaaaacaggatcttaaattctttattaaaaataataagtggaaatgtgttaagcaaaaacattacctgacctctttttattcattgggtgataataacgtgtaaaataattgctttatttacatctgtattgaccatggctgaacttcttgccagcaggggtgtcgtgagtcctgttcatctctctgccccttggtgggatgcctggcacttggccacttggtaaatactggaggaatgattgaatatgtgaatcatggatcagttctcaggaatgttataatacaaacaacagtgatatttagtacaaattgaagacataattatctcagttacttctacaacttttaaagtgacttcaatgcagtgtagcccgcaaacatattgcagacctgtttggataacctctttctttgcattgtcttccccgccactccttttggagactggattctcactttgttgcccaggctagagtgcagtggtgccacctcagcttgggtgttcctcccatttcattgtcctcagtcgctgggacaggtgtgtgctacaacactcagctaattttttaattttgtagaggatttcaccatgttgcctagtctagtctcagacggctgggctcaagcaatttgcccacctttgcctcccaaagtgctgggattacaggtataagccatgtcctagcctgtattattattaattaattataattcaaccctaggaatatacgttgagttataattaaaattccatttttatttttaagcagagttttataggcattactgttacaacaaagtttccccttgccgtgtttagagtggtgaaactgaagttttcttttcttttcttttttttttttttagacgaagtctcactctgtcaccaggctagagtgtagtggtgcgatctcggctcactgcaacctctgccttctgggttcaagcaattcttctgcctcagcctcccgagtacctgggactacatgtgcgcccctgcccctggctaattttttgtattttttgtagagatgggatttcaccatgttgcccaggaagggctccatctcctgacctcgtgatccgcccaccttggcctcccaaagtgctgggattacaggtgtgagctactgctcctagccggaaactgaagttgtttaattgacaggtttcaggcctgtgaaatacacactgagcacacaccctgcacatttcagctccctgccttcgttttagattctatatctgcagtgccctgccctctccttaaagtgtgaaactctcaatcagacccacttcctgcactgctccccaggtgtcttacattccttgcaatattttagactgcatatactattttgtactcaattacataattttattttgttcattattgttttatccttgcttgggtgttttcctcactatgcgaagaagaaccctaagaatgaatcatcgcactgggaagggaagcatttaaattttatttaatgtatttttataattggggaactgtaagtatttttcttagcattaatgcttgtttcgaagaaatggtgaacttacctgaacttagtaaatttttgtcgtaataataggatattcacaattgtttttaatttataaatatgtaagttgttttctactagggtgctattttagggggggaaatttgtaaaaatgttcagtcaaaatattgtcatgttaatcgtatttttcaagatgtgctaaaaatgatttccaacttagagcaaattagttagaggccaccttatcccacctccagcctactgctgtgtcccctctgcaacaccttgcataggtaattacctgctttccattccaaattttctatgacaaggtgctcctacctcaacaggtgatcaccatagcaacgaggtagtctattctatttttggagtatgaaagtagcgccttcttaaatctaataataaatgagagttccagaaaaccagtgctttaaacaagtttgatttacttgattttttttttttttaaatcacactttgggagactgaggcagaaggatcacttgagtccaggagtttgacaccagcctggtcaacatggtgagactctgtctatacaaaaagtataaaaattagccaggcatggtggcacttgcctttggtcccagcaactcaagaggattgcctgatcatgggaggttgaggctgcagtgagctatgatcatgccactgcacaacagcctgggtgacagagtgagaccttgtctcaaaaaaaaaaaaaaaaaaaaaaaaaaaaaaaatcatgtcattcagtcatgtttttattatatttttcagactgaggacatatatcagggaactagtattattgtgatattttactattttcaaaaaccagtaactaacatttactattgacttattgtgtcttggcagtatgctgtttttactcctgttgtgcagatgaggaaactgataagtcaagtcttgatcaagttcacagagctagcaagagcaggaattggaattctcacccaggcagcctgctttcagatcctctgctgtaatccatttctctgtcttgctggagccttgctcgaatgcttcctttcttgggagttcagccgactatgagcgcctgaccctttataaaggtgctttatatgatgtgtagccctatgcaaatagtactggggtgaatggaatgaaaggggatgaacacgacgctatgggaatggtagcaagtcagaaacaccttggaattcagatagcagcatgtcctgtcaccgatgtttaaaattatgcagtttgaaatacaatgtttttaataaagttggttgcagatgactcaacagctatgggagttatcgaaaggtaatgtagaaatgcttttagtgttcttccaaatgctaggaattggattacagcatctatttcactcagcatttgagtcatgggaccctcatttcattctgtagtcaattttcaaattttgcccttgtaaatattaaaaggctcaagaggataagctaattaaaccataatggttaagtttattttatggtgacaccttgtagggagggttttatgattaaatattcaaaaatttgtcttggtttgataaccattatgtatttttttttttttgagatggagttttgctcttgttgcctaggctggagtgcaatggtgcaatcttggctcactgcaaccttcgcctcctgggttcaagcgattctcctgcctcagcctcccaagtagctgggattacaggcatgtgccaccatgcccaactaatttttgtgttattagtagggatggggtctcttcatgttggtcaggctggtctggaactcccgacctcaggtgatccgcccacctcggcctgccaaagtgctgggattataggcctgagccgccatgcccagccccattatgtcttttgtttaatgctgaaatattgaagaaagaacttgaaattatctttatattttaatcttatttcacatctaaactcatataattatataagtagatgagattgtagaatataaccaaccccccttatgttccagatgaagagactaaggctcagagaagccatgtaatctgcccaaggttgcacagcacacagctattgatgaatggagcctgggttctttagccccatcacactgagtttttgtgtacgtgctcatgatttttaatttggttgatgttaacatgttggcatatattgaaagaagtgggagcatccttgaagaacttaacacgtattaaacatttgcttccgtgctgggcaaattttaccctttaaagtaccatgagaagtgatagtattgtcactgatatcatcattattgtcctcctcctcatcattccccattctagagacaggagggcctgaatttcccagagattaagcagattctttgggggatctaggtttcaaattcattgttgtttttaagagatgaggtctcactctgtcacccaggctggagtgcagtggtgtgatgatggctcactgcagcctcaacctcctgggctcaagcaatcctcctgctttagcctcctgagtagctgggactacaggtgcatgccaccatgcctggttaatttttaaattttttgtagagatgggggtctcactgtgttccctgggatggtcttgaacttctgggctcaagatcttcccacctcagcctcccagagttctgagattacatgtgtgagccaccaatagctggcctcaaattcttgtatctggtactgtgtattttgcagcagggaaaatgaggttttgactctcctgccaactctcaatcaattgactgtagctgattggagcgctgtgtagagcatatagcagtagcctctgggcttaatgggacagatgcagtatctggtggtgtatgccatgaccctgaaatgtggtcacgatggtacatgtatgcggtatatatgttaccagacctatcatttctcttaacatagcaatctgattcttagtttcacaggataggaaactcaattttaagtttacatgggaagatggaggaaggcttggttggatcaggctttggaaagccaactgttgttaaccaaatacacagaagactgttttttttttttgtttgtttgtttgtttttgagacagagtcttgctctgtcccccaggctggagtgcagtggcgtgatcttggctcactgcaacctctgcctccctggtacaagcgattctgcctcagcctcctgagtagctgggaccacaggcgcgtgccactgtgcccggcaaattttttttttttttttttttgtatttttagtagagacagggtttcaccatgttagccaggatggtcttgctttcctgaccttgtgatctgcccgccttggcctcccaaagtgctgggattacaggtgtgagccaccatacctggccagtatggtctttaattgtaagaaaactgaagagagagggaagtaaacaaagattttacagtagtaactctaatctaagtgaatagagaagttcttgattataacagaggccagaaactgttttataagtactaatactaattcagtaatttacctttctattttcactcacatatgtttattctataaatgtcttattttataaatgttgactgttagaatctctaattaccgggtgtgattttttttttttttttcctcatcttattgaagattctcggatgaagagcctgtagcctccagtggactgactttagtagaaaggctttaattgcagaacctctgagttgactataacaaatgcagtttattttagactggaaataacaaaagcaactagtttgagtttttgtcaaaactcaaactcagttatctgaaagaatttattatctgtagagtttcagtatgaagaatgcagttaatttgaaaattcgtgattgtcttaaatgtctgcttatgattatttgttaattgcttatttttgtccttttgtcctatgtctccaactctgtcctcttgtgttactgtgttcaatattaggcccctgcctacctgctccctccctccctccctcctacccttccttccttccttccttccttccttccttccttccttccttctttccttccttccttccttccttccttccttccttccttccttccttccactaactgctttctctatcatttttttttcaagatatttaggttgctagtctcaagtataataagggatattgcaaaatatttagatgcattagatggatcatattactcaatttttagtagagcagttattttgaatgacttttagttttggtgtgtagctcctaattcgtggttaatttgtaatcttatgcttggggttaaagggcctgctctgcatgccctacagcattttgatggctggctgatggcacctctgccatccccactactgctggactttgtctaggacttgggaaacctgggtctgtctggatttacttggcctgttgtctttcctcctccttgtgcttgtactccatgttggaagggaagatatttttgatgtctagaaatgtgcccttgtgagggaagtacaccacagactatactagttccacaaaagaaactagtatagtttttcaaaaatagcatcatctttttaataactagagtgttcacaccgaagggtgaatggaaaaaaggagtaagtttttggataaataagaattgtgggtgagcaggccaaatgttaaaaattctcttaatggttatactgttgtagagtagtattgaatgatgcatttgttcagccagcagcccttatgtggttctgctgtttgggactctagtagatacattgagagctacaaaaatgtaaacgtgtgattcttgcctttgatgaccttacttgtgaagtgaaatgagacatggagaggagtgataatatacaattatgagtgagacatatgttactattatagataatggccacatgtaacaatcaaccctgtgcttcttttgaaatagtctttcaatgggtaggatgagactaagaagctcctagtatgaaagcatagcacatgtggaaaacatgtgtttttatgagttatactcgattttaggtataatggaaatgaccagggtcttaagtcctccaaaattgaatagttcatataattcttgattgcagttttaaatattttttcccaatgaacacacaatgtctgctgtagattttggaaagtggtagtcaaacaaagtctcaacttctttctttttacatatagaacacttattagccatctgtaatatgtgagcaatagttatataaaaatttgacttcaaaagcaaattatcattttcttagatgtttttaatgaattggaaattgttgtgtgtgtgtgtgtgtgtttggttttggttatttgccatttaagtggaatttaaaatccttcatacacactccaaagttattgttttctgtgtctggattctaccttactgcttctataaagttgcatcttctcatcaaaattatatatggtactgctaaaggggttggtggaaatactctattgaaaagaatataattatgacatagatcatatacctagcttcacattaagaaaagagtattgagtatttgaaaaacttgacactgtgtttataaatatctattcatctagtccagcactgaagagtcatataagtacttaatttcagaggtgaatcacaagtggcattaaaaatgtatttttcttgttacctgggacctatagatttaataagtttaaattattcctttggcctcaactctggtgggtaacctaattctaataccatggtgaatggttactgtgactacccggttgctaagaaacctgttatgttatcaagttgccttggcgaagtaatggcttcttaggactccttagcaccgctgggaggttgttaatcagagctatggaggaccttacagaattagttcccctggttataactaatttttctttaggaagagaaataaatctaagtctgtaaaaactgaaacaaaacaaagtataaattattttaaattgaattgagacctttagttattcaaaaaaaatttgatcccgagatacaaacctgtttttactagtatttttactagttacaaggatctgtgtcttgaatggcagcaacccaccccccaccctgcttaacttagcattccattttcgtttgcttagagtgattcttggcagggcatttgcaatgtatagaagagtatttgaactgagatcccgagggaaaacactgtgtgaaattattttagtcatttgatatcaattgctcttgctatgaaatgattcaacattttattttaaacaaatggtacactatgtagcattttaaaaaatgtaccacacttggtactgggtcacgaattctgttcaaggcaggaacctggctttcacaggatttgctccatggcaaaaggtttcagatgcttaaagctccacaacacaggttcagaatctgagaagtggtgctgctgataattttgtgtaacttagctctcttccacattgttttctctttttatctctatgcctggaggtgcttgttttcagcaaattacattttgagaaactctgttcttgactattgtttagaggtacaatgcagaagggggtcattcccattagacaccattctcctttatagcagtacaggtgaagtcacaagccagcctgaggaataggatgagctgttcaattacacaggagtgggcacagttaagaacccagtctttggaattccagtcagacggcctggacccaattttgggtcttctgcctcaaactttttgaccttaaatcagttctataatgactctaatcctcagtttcctcaacagtaaatgagagataaaacacttttgatttcagagttgtgtggattacatgagattatatgaaatgcttagcataatttctggcacttaatgtgagcctttgtaaatgtacaatgttaattattatagaggacacttatttgggagctgtaagttgtttctttaaatctgaaagatttaggtacttgacatttgatgaagccacccacgctaaagcttttttttttttttttccttttgagacggagtctccctctgtctttgtcgcccagggtggagtgcagtggcatgatctcggctcaccgcaagctccgcctcccaggttcatgccattctcctgcctcagcctcctgagtagctgggactacaggcaccgccaacatgcccggctaattttttgtatttttattagagacgggatttcaccgtgttagccaggatggtctcgatctcctgacctcgtgatccacccacctcggcctcccaaagtgctgggattacaggcatcagccaccgcgccggcctaaagcttttaattgttgggaagatttttcagatttttaaatttaatttatttttaaatttaaccttaaatgtaaaaaaaatttttttagacacagtgtcttgctctgttgcccaggtcggaattcactggtgtaatcatagttaattgcaacctctaacttccaggtccttcccatttcagcctcccaagtttctgagactacaggtttccaccaccatgcccagctactttttttttgtagggatggggtcttgctctgttgactaggcaggtctcaaactcttggcctcaagtatcctcctgccctgacctaccaatgtactgggattagagtctcccagcctttaatactttataatttatttccatgtgtctttttccttgagtttagagttggacattctaagttttagccctaacccttggtctttctgggacatcagttttctcatctgtaaaatggaggtgggaattgacttacatttcaggtcacattctgtgatctgagctctgggagagcttggtgaaaagttcccttctgattccatcctgaatagaagaggaagggtctagaggttaaggacagccctcaaagtcttggaatgtcgggatgagccacacaaatgatggtacctcatgtttctctttttcttgtccaaagaagacagccagagctctcatagtaagtgagttaatgaatggacagtctgtgtttgggttaaatacatgctttcggttattacttttctcttttttaaagaacaattcttggccagacatggtggctcatgcctgtaatcccagcactttgggaggctgaggtgggcggattacgaggtcaggagttcgagaccagcctggccaacatagtgaaaccctatctttactaaaaatataaaaattagccaggcgtggtggcacgtgcctgtagtcccagctacttgggaggctgaggcaggagaatcacttgaacctgggaggtggagtttgcagtgagtcaagatggctccactggattccagcctgggtgacagagcaagagactgtctcaaaataaatacataaaacaaaataaaataattatttaaaatgtttgaaacagcctcaaaactgcagaattgttacaaatacaatgcaaaatacttgacagcacttgttagctaaccccaacttggtttagagaaataatttgaatagcacagagaacattttttcctgaaccgctggagagtaaattgatctcttgatgcccatcaaccctgaatatttgttgtatttccttacaaacaggtattcatctgtgtaactacagtacaaccgtcaacattagaacacttactttgatgtctgtatttctactgttgaatccccagaccccatttaggtttgggcattgagccccataaaatcctttgtaacagaaggattcagttcagaatcatatgtgtcctttagttggtgtgtctttttaatttctttaagagtgggacaataacgcagtcttttccagaattctgtgaccttgatacttgtgacaattacaggccagctgttttgtagcatgtcctatttgaattagttgatatatcctcatgattagatccaggttatccatctttagcaggaacatcacagaagtgactctgtgctctctcttattgcatcctttcagatgctcataattttgatttgcctcattactggtgatgatcactttgatcattgactaagatggtacctgccagtcttctccattgtagaagtcctaattttcccgttgtaattagtaaatattttgtaaggtggtagttcaaagtgatataaagattccttttctcaccaaattgttgatttattcatattcataatagtaccgactcatggttttgttaccattcaatgggttatattactattatttattttgatgctcaaataaaattcctttaaaccatcttatgtgtgctcttaacatgtcctcttcattctttgagcacatcttttctggttcaaagagatgttccatattcatcttgtacttgtacaggacttgtaccctagtcctgaatgagccatttctctaagaaatcctggtgtcttttagtagagaatcgtatttaaaagccaagatctgtggggggtacatgtgcctgttagtattgcagttgtgcctctccaaaactgttagtggatagagctggagaatacttgaatacgtgtatgaatatacttggatactcacgtaggtaatacacatgcataaaaacacatttatttctacatcttactatgtaggttgatatcaaggagtttacactgatacctccaattctgatcccattgttgttctaattctttctgtatttgtaaaactgctaccatttctatgacagaaatctgacacgtatacatgtgtaaccagcctctcagtgcatctctctcttaaccctaggctctgatacctgatgttagactgctaccgtgggtgatgtcttcatcctgactgttttccacgttccatgacaggccacccttttatgtgaatactccatgtagggctgttcccacatctagacatcttccttatcccactcctgactccctatgtcaagctgaccccctaaccctgggatatctaccttggaggcagggaagaggaacaggaagaagaagagctctttccttttctatttccttgatgaggcctcattctgtcacccaggctggagtgcagtgctgtgatcatggctctctgcagccttggactcctgggctcaaaatgattctgttgcctcagcctcccgagtagctggaactacaggtgtgcaccaccatgcctgggtgatatttaaatgttttttgtagatacagggtctcactttgttgcccaggctggtcgtaaactcctggcctcaagtgattcttccgcctcagcctcccaaagtgctgggattataggtgtaagccaccatgcttggcccattttcattttaaatattccaagcgaagctatttagaatattttacttttgaaaacactattatacttatcaaggaaaatgttacatatacagttaaatcctttcttaatgtcatcaataggttcttggaaactgctattttaagcaaaatgatgtgtgatgaaactaattttaccttatgctaattgatataaatagaattaagttcctgtggcatattttaggcccccaaaacatcaccaaacttctaaacaaagaccccaaacatttctaatggtaaacacggaaataaatgtgaactatacacactttgaagaaatatcaataaaaacaaggaagataattatttacccagtcagtgagtgacagcagtcacggtggcagtgggttaaattaaggaataaatgtttgcaaagtgaaaattgtaagaagcatctcctaccaccacacagtttacaaacaagcagtaaatatggtgggctctctgagcgcttttgtgtttcatgcatttgtatggttaccatatactttacacatttctgttttacaatactttgtaatcattcattcattctctaacctgttattccagttcagcattgcaggggtccagagcctatcctggtagtacaaggaacagatggaacccaccctggacaggatgtcattccatcacaggacacactcacacacatacccacactcactcagactggaccattgagacacaccagtgcacctaatgtgcacatctttcagatgtgagaggagactggagtacctggagaaaacccacacagacatggggagaagacaacggggaaattccacacggaggccttggccaggagtcgattttgttttctcttatcaatgttaccatgaaatgacgttgaatgaaacgttattcaaagacctgctgtatacagaaggtccccagtggttcgaattgtgattttttgactttataatggtgcaaatgtgatatgcattcgccaaaaaccatatgagtgcccatacaaaccattctgtttttcactttcagtatggcattcaataaattccatgagttattcaatactttattataaaatagtgtttgtgttagatgcgtttacccagctgtagactaatgtaagtgttctgcgtgtgtttcagccaggctaggcttaagctatgatgtttggtaggttaggtgtattaaatccatttttgacaagatattttcaacttatgatgggtttatcagaatgtaaccccccccttaagtggaggagcatccgtaattgtttttgtcatttgagccgtagtttaaacaaatgaatgcaatggtatatttcctcagataagtggcctagcttgaaaaataaaaccatacctgaaaactaggtggttgtttgggaggggaaagagagtttgaagtgttttttcaaaagggtacccagcacccaagtacctttcttctgtttaatttttaacaaaagggctatctttgtagcaattgttgtcagtatctctgccgtacgcatatgtgggcagaaagctagagtttgaatagcacttgttagtgaaaaccaacttctttatggatttatttgaacagtggttcagaatttttatgcttaccatcttattcctgtttgaatacttggccagccatattctcagagctccctgctctagccagcctctctaatggctcctacggtgaagttctgttagcgcttccattggaaacctaccaggatggctgggttctggcaggatgccctctcaagaaagctgcagccccagtgggggaagcgcagggtggagtttttccaccctgcttctggctgctctccagaccctggagtgtctgtgaggttttttttgtctttcctttctcccttaacaacaaacaaacaataacaccactacttggacctatgagggacatgggatgtgtgtgtgtacgtgcggtggagtgggccttttagctccccagcagtgttcttctgcctctgggctttttggtcagtgtgacttcatgagaagtggtagcagtactgtaagttaggtctgtagctctagaggatttccctatcatggcctttttatttccccgtggttgtccaagcaaagcaatggaaatctcctgctgggtattaactatctttctagaccattctttgcacaaaatgctgacttaatgagagtctaagtcacccttagcaatttctcaaactccaaactatggcgtgttacaagatggcaactgcttagtagatatcagaatagccttcatgttttcatggcagggttgccagatttaggaaataaatgtacatgatgcccagttgaagttgaatttcagatctacagcatttttttagtgtaattgtgtcctgtgcagtacttgggatatgctggtatgaaaaattatttgctgtggttttgaaattcaactttatctgggtgtgctcttttatctggcagctctacttcgtgcatttttgcatgatgtaataacttggatacatgttgtccttagaatattatgtatatatgattagttcctaaaaagtgactggcttcacaaataaacccttgagtgcatgaaattttgaactccttaaaaggcagctgcagttgagttggcaaatcacatatgccagatttccagactgagttgagtcggccatcatgaggcaggaacttgaagttacatcatctagaatttcccggtaccctttttttcctccctctctttaatgactctttatttgtaagttagaaatttgggctaagcattcccttcaaaaaggcgtctttcctgtattcattgaaaaaggcagaaatctttagtattaaacaaaacagactcatctatatgaggttatatttgtgcatgtagaaagaaaaaggaagagttttataaacttctgccttgctttgtcttttatttgaccagtatttcctttggtgtattctacaagaagaccagagaaccacacatgatagtagtaaagatccctccggtccccttttagatactttctgtcatatcctttgacacacttgattcaagtaacaccctcttgtaagggcaagtggttattcctaattttgtaagttagaaattctctaaactgaacagtgtattggtctctttcccaaaggatgcaagatttgtcttcttataaagccttaagaatggtctcattaaccgtctgttattgaatgagtagattcttgtgtaggcccttctgttctcagggcggtcattctaccttcccctgagtctctgatccatgatccctggaagagattacttgaaagcacattcataattttgctccacattcatgatttggcttaaagagaattaagaattattatttgagcctttttaatagtttgctgcagggtttggcaaactttttctgtaaagggcaggatggtaaataacatgctttgcagacatacagtctctgatgcgtactcttttacaaccctttaaaaatgtgacaaccatttttagcttgtgagctgtaccaaagctggccgtgggctggcagtagttttcctgagtgtttgtcgttagaaacatactacatagggagttctgtgggttctgaaatttacccattgttttcgatatacatagaagtgggaatgaatacttggcagtaaaaatatgtgacaagctgtgggcgctctaatatcctggaggacattgtctccctccctgccccctttcccctgtggcagttattcatatttttaatagaattttgtaatttcttgttaaaattttggattttgtgtttacactaaacaaaatgtcattctgatggatttcttttgtcaggtatgtaggagcaagtggtcatatagcaaattcatgcccaaaggcgggagaaagcaagacaggacatcagtgtgtcttctctttgaatttatttatttatgacatagaggatttggtgaaattttggtatcaaagaacatcctaaccagtttttctatctttctgaaccgtcgattcttaagaaactgcataagcattttattttgacaccttatggggagggatgttacattcacataggaatgtaactcaataggaagtttgccctttgatttgctttatcttttcactgatattctttgaaagattatgcttggtgtacctccagattgcagtggtaacaacaggcaggctcccaaaagcacctaaggggagtgacgtcccatgagaatccatcatacatttcataccttttcaactgctgctcttagtgcttggtgcaaagccattcaggctctcctcgtcttttattatacaaggaaattggggtatttcccgtcacttttttccccttcagacttttacaaatgatttttgggcccgaatgtgattgtgaacagacagacatagcttctaagaaagccgttgggacccactgaattgtgcctgtcagacaaaggcattttgtttagaaggcttgtcccaaagtggtgttggagtctgaaagaagggccgccagcgtctcgttctttctgctgtgaactaataggaaagctgatgtttgctgagtggatggctgtactcactgtccaaacagatctgtgtttgccaactgtgaacatattgctgcctctgtgaggcactccatcatgccttgaatggatcctcttgtgttcagaattttctgactcaaagagagggagagagaaatatttctttcagacttcagcattcactgtagcatccatagtctcatcagacctttagaaaccaagcatgcaccggagacgctgcttaaggagagtgagaaaagagcagagaataaggaataaagagacagccccattgaaatgcttttattctgaccacttgtggccaagttttcgtaaataaaccaggctgccttggcaaatagaattgtgagaatatttttaatttctcctgagcaaaatagaactctgagtttccaactcatggtccatttctgtgcatttatacatacatgcacagacaaaaataaaagcatagaattcatttataatatattattaaatgggtgatagagttttattccacctggataatcccttaagaaaaggctaattgaaacatatgaaggagttttgattactttgtaaactgtctcttagttttagagttacaaacttattgtatatgaaagggtgaaaataaagtatttttgttgttgttgtcagtttagtcactttctataagttgacagtaatagtactttctggagaagtctagtattcactgtatgaactgaggatggagctcatggaaaagatgtggcattccttgcaattacccattgttttgtgtgttaaatttcagaagacttggttgagtgggtggaaaaacaacactgctgataatgaaactcagtgagcacatggcatgcacaggacacttacccattttgggctgtgttgcttattgagtacatgttgaacactgaacagcttcactcggcattgcggtggaaatggagagagacggaaaggacagaatgcttttgtgagtggaaaggtagatttctgtgcagttctatgcagcggtaaacgttgcctggccttagtgagaactcaatgttgatttgcctacctggagtaaatgactttttttggcatatataacccataaaagtttaaaaccagaattaccctcccccctccaggctacaaccatttggttatctggatattcttatccaggactaactgtacttatggaaaaatctagttctttaaacttactggttataactgaaatataacaggaatagcagggacagttggggtaggagagggcctggcaactatggctgccatagatgtaatagtagtgatctcagctagcccagctgggaagcccaccatgtgctgggtactcttctaagtattttatatatgttaactaatttcttcctcagacaatcttgtgaaattgttactattacttcattcattttataggtgaggaaaccaaggcacagagaaaggtttattaacatgcccaggatctcacaactagtcatttgtggagtgtggaattgaatttagaggaggttggccgcagtatctgccacaactactacagcactatggttggccggggaagaaacctgcattctccttgtagagttttctatttatctttcctttatttcttggagtgtgtgtatcatatcatatggttttggaaaagtgtctgaaggtcatcaaaatctaagtactaggaggctaagatcagaaagataacgcattctataggtaaaggaatttgctcctcattgtttttatcatggaaagaagttccacatttaattaattcctggttattattattacaaattggttgaattacattgtggtctagtagatagggctgggtaataatacattttgttcagaacttgagagcttgattttaaacttaaagtcagccatttatatgtaattaaatgctaatataaaaatattcaatcatatttctttatgatgatggaatgagcagggatatgtgtatatgcaaagcttggaagcaacgtttttacaaccgtagggtaatagtactattgcctagtgtgagtagcttttctcaagagactgtagggctgattgaaattggccagtttcagatgatttttatgggagttatgtttattgcagctcattaatgccatgtttaatagttactggttttctgaaatgttgtcctgagtggaaagggggttccactgctagaggattaggacctaaaatagttttgcgtgaataacgtaagtttgtaacttatttcttgggaacctgtttaaaagaaagtgtacttgaaaggccgggtgtggtggctcatgcccgagcttactcccaaagtgctgtaatcccagcactttgggaggccaaggctggtgtggatcaactgagctcaggaatttgagaccagcctggccaacatggcgaaaccctgtctctactaaaacaaaaattagctgggggtggtggtgggtgcctgtaattccagctacttggaaggctgagtcaggagaattgcttgaatccaggaggcagaggctgcaaggagccgagattgcaccattgcattccagcctgggcaacaagagcaaaactccatctcaaaaaaataaacaaaaaacaaagcaaacaaacaaacaaacaaaaaaaaaaaaaaaaaaaaaaaaagaaactatattctggagactatattttggaaaatgagttataaaaaaataaaaatagatcacactttattgtgatgttttatgcagtttgtataaaccctggctgaatttaaaatttttgcacatggtattgaacacatgaaacctatcaagatgtttcagtatattgggtttgctataaaactaaagtttattcaggtttcttcttttgagagagagattatgacaaaagaatagcttgactttctgccccaagaatctttgttttggccttttttgcctttgttttacttattttatatgtcttggacctatttttgcctattttgaacctgttttggaggggctaccaaactgccaaaccagtgaactcatcacagaagaggcagctccacatccagagaattcatagtctcagctttctgaatgacacctaagatcactaccttaattttttttatctgctagtcagtaattttcaagtcttttctgcttggtttaggtgtagtctgtaaaaggaaagcaggatattaatctgcatgaaaacctggagaaattagaaaacttttgttgggtattacttttgcccgatacctactcaaaagtagaaacagaaataccttattatattattatataataattatattaatgcgtgaataattgttatttatttgatacccattgtatttttaatcctaatgattaacattaggattaaaaatacaatgggtatcaaataaataacacagtttacaaggaaaaaaagtgaccaaagcaccctgtggatgcttttgtgaacttgtgcttcagtctgtgtttctgttcagtaggttttgataggctagacttctccagatacatgaaaacattaataatttagtacacaggctgaggttttattgaggtttatgtgggctcagaagggaggacatgtgtgctgattggtccatgggtggccaagggcgggcctggaaaaagcaccatccaattggccagaaggcatcaaggaaattctcactcccagtagcagtggcacacacctgtaatcccagccctttgggaggccgaggtgggtggatcacttgaggtcaggggttcaaaaccagcctgaccaacatggtgaaaccccatctctactaaaaatacaaaattagctgggcatggtggcacacgcctgtaatcctagctacttgggaggctgaggcaggagaatcacttgaatctgggagaaggaggttgcagtgagccgagattgcgccaccgcactccagcctgggcaacaagagcaaaactccatctcaaatagataaataaataaaaagataatttagtaaaattaaagggttgaagtgtaacttaataaaaccttagccttaacaatgctttccccagtctttagagggaagatttgtttttaatttccttgtaaatctcattctataaggcccatgctggacagatttggtgattaagatctgaacttttatttttttctttcctatagctgacattagtaagaatataatatattgtgatatgagcacctgggaaagaaaaaccaaaggtgtgatgaagcacaaattaaatgaatctgacatttctcccaactcctggggaacaatagtactttgaactgtaatttactatgcagttagagcaatttaatagattaggtggacatgctgtctactgtcagaaatggctttttcaaaacatgaatagtaatacatatatttattttaagcccttctcatatagccttctcccggagggtgagcaggttagggggcataagtaaatagagaacaaatggagaatacagaatgtgtagttttagtggacgatactgtttatttttatttatttttaaagttgatatataatcattgtacatattgtatatattgttggagtacatgtgatattttgatacctatatgccatgtgtaatgatcagattacgttactgttgagctatcatcatcacaggatccttcgggtgtcacttcgccagccagaaacctctgtggccggcggcgcctctgcttgagctttgctcgtgcctgctgggctgcttctgcacactcggcctgccaggctgtgctcagcttgcgccgccggctgggatcctttcctgccaagggtgcgccaggcacggagcagcgaggggcgtctaagtgtgtgagcacagggtccggccactgtgcacagctaggcattctggctgctgcggtggggtgggcagctccatgcaccagcacaggtgctggctccatgcgaggctgtggctggaccagacataccttaagctgcgggtaccagtgtctggatgagggaaacacagtggcgcctgaaagttctgagatgccaggaaccacagagccccaaagagggtgttacagcatgtcacagccctggcttagggagcactgagttctgggctctcagtagggccgcagctcttctctccttattgccggcagtgcggtgagtgggtgtggaggtgggggttgtgtttcaccctgtttgtgttacagctctttcagtcatgcctgcctgtggctcctggactggttcagtaccaccactgcttcttgttgcatgaggtggctgcctggtgctggcagagggcgggagggctatagtgttacagcccctttagctcccgcccacagctgggcaagctggccaggaaagtgttacagctcctttcgttcctgctgtttggcgggtcttgagttttttttccacgtcctggaagaatgaagttacacgggcaactggagggtaagcaaggcagagaggagctttattgagcaacagaacagctctcagtggagaggagacccaaagtggttagctcctatccacagacaggtgacgagtcgctgagtctgggggtttttatgggcgcaggagggtgaccatgggtggccacgggcgggcctggaaaaagcaccatctgattagctgaaaggcatcaaggaagttatcactcccagtagccgactccaccccgaactggcagccccaaccgtaggctacaggccctccctggcttagaggtggatttcaccagggacccactgcttcctgcctaggaacctgtctgcctcccaccactatcaatatgccatccatggcgccccggctgtccagcccgaggggcacctgcaggcccgcactgaaccgccctcagccccttgaccttgttcccgtgctcattggtacccaacgtctggagggagcccaggcagcagggggctggcatgtcagtgctgccccgagcacacacacatccggccggctcgtgacagtgcccaggctcggccacaactgtttccagcactggagcgggtgccaggggcagggagaggccagggagtgggagaaggcacttctgagcctgcggcagcgcagggatgcctgggtccggagctgcagctgggtcgctgcagctgtgcctggggcgcatgctctcatcctgccaacttggtagagcacagggctcccactgggatcacctgttcccgcccccgccagctccactaagccgccgcctacccctccgtgcagctggcatcgttgcagtggccgctccacatgggctgccactgctatcattatgatgtgttttgataaaatagatcgttagatttttcttaagagttctgcatttttcctttcttttctttttttgttttccttttttcttttgaagtgggtctatgtcactcaggctggagtgcaggggcacagtcgtagttcactacagcctcaaactcccgggcccgcgcaatccttccgcctcagcctcccaagtgtgctgggactgcaagcgtgtgacatcatgtctggctaattttttgtttctaaaacttttttagagatgggaatctcactttttttttgcccaggctgttctcaaactcctgacatcaagtaatcctcccttctcagcctcccgagtgtctgagattacaggtgtgagtcaccatgcctggcaaactctgcatttttgtagtattttgttttagttaaacttttcagctgagtgcaaaaaaatgaaaagatttgcacatgattatgcaaacaggtacgactgttgagaagaatgagctaaggttttagggaagaaaatattcttttttctggctcatgtgagagaattagctcagcttagaagttacttgctttttgatgtgttactcggatgtgttacccatatatagaatcattaaatcattatctttatacacattcttagtgagttgagattttgctgctgacacatttgcaaaagttgggattgaaaattagagtttcttgttcagtgctttactactctgctgttccagaaacctttaagttaaagtaacaggttaaagtatttcatatgaagagaactttatgatttcatatgacaatatacacacactgaaaaacatataactgtttaaatattttaatgattacaaatagtataacaaaaattagtcataacataaatgtaaaaatgtaggtttttaagtagtgagttcagtgctgattggaatactaaggatctcaataacctagtataattcaagatgaagaaacagaaatcatggccttcttcaggtttgaacttggcgggaccctgtttgcaggctctacctgtctctgcagtggcttgagttcctcattggtccactgacccaggtgtagggaagaagttggctggacttatttctgaatttgattgtcagtagcccagggttataatgatttctcacaccttggacatacagaaaatgataaaatataatgtttttagaacctgattttgcaaaggggcatagataaggtagattgttagaaggacccaaggggaatggttggaaggcatgtcatagaaggagaagataaagaaagcctagatgatttttgtctgtagaagaggagggctgatggaattcaactgcctcagtctgtatctaaatcttgttttatgggattgaggttacgttttgtttgtgtggctcttaggaacagaattcagatttctgcctttgaaaaaggggaaaccctttaccagttgcgattattaaaaaatggaatttcctgcgttttgagatagtgaactctacactgaagtattctgctacttgctagaaattttgttcaaaagttcaagcattaaatggggaattggtctggatgaccgttaagatccccaagagaattccaattctgtgaccttagctgtcaattaaagatgtttataaatgttttatcaactgttctacctacttccttattcttagatgtatactatttcatgttaaactatcaccagaggccattaatcatataaataaacagcaataattgcatagactgatgcgtcatagagtgcttattatcctatattatataaaatcctgtgatcattttgttgttgccatggaagtataacagtggttgctttattatgactaaagctgggggactatttttagccaacttatagtcatctttgccagctgaagcatattcaattaaatatccattaataagataaagtttatggaactctgctaatgactctctttcccttttcacttttaaacattgtgatgaaattaaagcttagctaattgagctcaaggtaactacaaatgagatgtgcttcaaggatcttgaatgagcctatttttttctaccttctatttattttttactgcgttctttctaagtcattcttctgaactgatccatagcacatctgcatcaaaaccagtgatcagggatggcctgaggaagtggggctgcttgtggggaaaagcagactctgaaggcctggaaatctacattttcaaaaaggcctagaaattttgatgtaacagacatttgaggatgatagcaggaagaatttagaaattgtcagctaacacctgtcttctagaatctgcaagcatagagctacgtgacaccagtaccagcagtaccacccagcatattactctagaaggaagcacagaaattatcaggtttcttctcttttactttgtatcatggacaaataagtaacttgcccagggccatacagactgaatcccatatctccactgagccatttggttttgatgggggtggactgaagagaagaactttaaaaaatactattggaaagctgaactggaccagtgaccagcctctggattcctgtgatgatttgtatcagttaccattttgaatatcatgcatatgctatggtcacagatctcttaatgcatcacaaggacagttggaaaacaattcatttgagattaattggtactgtgtattttctggttgtggcttttctgccttgtctgtagtttacacaccaatccatcaaattatttccttcctttttctttttcttccatgttaggtgtctgtctggttcctcccttctttttcaaagagaggatcaactttctgccccagatcctactttctccttatctgttctctacttcattttagtaacatttctgtgcagacagcctaacagacctgacctcagatctctggccaggaagtttttactcaaatactttgacagtgttttactcatctaaaagtgaatgtgatccctagacaagtatgaggctgaaggtgcgtctcattggacctcacatgtgagcatacgtacgtgggaacatgggggttcttttacaggtaaagtcatggggaagacaagtcataaaccacagtggtttctcaaaggcagtgatagagataagatgatgaagaaactcctgtcttctcagtattcacagttttgtttgagtagggatgtctggaaaggggaggagtataatgctaacgttttgccttgaagggatttatgagttgctcatatttatatatcatgcatatcatttgtttgtgctcatactcttgcttaaccattgatagtactgtatgcgaaactccacattttgatgtactcttgtttttagtgattacctggtaattttgccttccccccattcttacctatcctaatatggcctctttttttagcctttccaggtaagcaaactccaaagccttagtcgttgttttgaggaactaactttaaaatgtatctattctattgaaaatcttgttgctttttccgctgaggataaatagcagtgaatcagctaggagacctttctggtaacctgtcaccccaaatgtagacactccattttgatttgcctcaagcccccttaatagatgaagggttggtttttgaaaatgaaactgtagcttgtttagtaaaattgcttgtttctgtggaggcaatgtgccaagagtagaagcatctatgttacagctgtaaagctgtctggtgcctctcaaacaataactttgtcagttcatttttatggctgagaaagtagcagtctaggtgaccaactttctcataattgcttgggggtgtttactgactgcccttgatcagactccaaacacttcagaggtaggagagcctaacctatttgtagtcgttatttaccctcagccctcagcctgccctttgttttttacttacaaacaaaagagtaaaagcaacaggctggtctgtaggaactctcagttactttcctggccgcttctgtgtggttttaggtaagacagagactggaactatgtacatcaaactaattatctcagagccctttattaggtccaagccgctggacaacttagaagatttttattaacaatcaagactcttttgtaaaattaagttaattttaggagattgatggtcccttccagcctgacactggagtgatgatggagtgagtgagcagccttctagattggagagaaagtagcatcaggtagataaactgtgactctgtgttttatggaatatttggttcgttttttttccatttccataatcactcttgattttccttagtagttctagtccatacatcctggacatttctttcttgcctttggattttaagtgcatgagttaaaagaactaagctagtaaaccacattaggatgttgtcaataaaatgcccttacaatgttgttaaagactttgctttatggcaagcactcttgcaggggcaatggcagagtcaaccctgagagtagttaaaagggatcctctgtggtttgctttgtaagcctcactaaagcaacaataattgaaatccttgaaatatattgagtaatgatatgttggtaaagcaatacatgattattacttgtcatacaactttcaggttggtgatgtttttcatgttctttcatttgtaacagatgaataatgtaaaacagcttgtgaggagtacaatgacgttttgttgtctggttaataatttcagcactatttgcaaaattgccctgctagagcatgacctaggaattgtaaagcggaacacaaataaaataggaaatgtgtatttgcccatgaattcttcgtggacttgttacaaaaatacttgtttgctgtcctgtcttttgctcactcctttgtccccactgagagaagagggccttgtggccaggcaaatgtgatggaggtgggagtacgtgaaggaagagtagacaaggttttattcatctctgttccctttcataactcttcctaagagcagagaaagctggtgagagaatgacaggcaaccctgttaaagacttgggggccgggcgcggtggctcacgcctgtaatcccagcactttgggaggctgaggcgggtggatcacctgaggccgagagtttgagaccagcctgaccaatatggtgaaaccctgtctctactaaaaatacaaaaattagcctggcatggtggcagacgcctgtaatcccagctacttgggaggctgaggcaggagaattgcttgaacccaggaggcagaggttgcagtgagccgagattgcaccactgcagtccagcctggactcagggccagtgcagtgaataaattctgcctcgttcctgctgagacctcccttagttgctctgcttgcatcaatttttaatgagcaatctttctgattcttgtctctacaaaatgcgtaaactttagtatgattatttaacatcttagtcttcatttttacctcggggcatttaaaatttaaatagccttgttctaataagcagaatagggggtaatttttttaccctcaacaagtttgtctagaggataccactaggagttatactcacctgttcctattcatctctcctgggaactccgtcttgcgtttgttattagctgaaatgctaatacgtgctctttactctgtgtgagaaagtctgagggcctctcggatgcccgtcatgggccaaagagaaaaaaaatgctgggatggtttgcttttaaggttttgaaatgaagcacttgatgctctttctgatgcctttgttttaattttgctgttgatatttgcaaggactttacttgttaaatatcagaagccttttctcagtattattgagttgtatttgtataattccttagggctttaatgtttacaacgtcctggtttaagtataaataagtttatctttggattacctgccgttccaaacctgacattaaagatcaaaacaaagaaagatgggatcttagtattcatttaaataagtttaactggctaggcacagtgactcacacctgtaatctctgccctttgggtggctgaggtgggaggatcgcttgaggcccggagtttaaggccagcctgggcagcatggtgagaccacatctctacaaaaaaatacaaaaatcagctgcgcatgtagtggcttgtctgtagtcctagctacttaggaggctgtggtgagaggatcacttgaccccaggaggttgaggctgcgttgagctgtgatcatgccactgcactccagcctaggtgacagagcgagaccctgtctcaaaataaataaataagtttaaatgataaggtaatcctgaatgttgtttatttgtagagtaagtaaattatgtttcaaattgggacaaggtgatgaagtttaacttgaagagcagagtcctgagaccctgggagattcagctttaccgtcagtctggatgtatggaacccactattttttgtttttccagagatcaatttcttggaccctttctcagagatcttctacctaactcttcaattatttctgttgctggatcagactttgaccaaatgctcatgctgcttgagttgcctgggctatgtgcctgactccatgctgagatacacagaaatctcaggccaaaagctgggtctcccctccccccacatggttctgtgcacctgtgcattactcattccgcatgccattctctccataattaagaacagaaatgtttgttctcgtcaatgtcattgtgtccttggcatcctgcacaaggtctggcagttacattgggttcaacaaaggtttgttgaactgaacaaagtaacaacgaagagttctaaaaactggagttgaagattatactacaagcctgtttcctggtacctgatgtctttgacagtcttaaagcttgcatttctgtagccctgaatttaaatcaagttctttttgaaaccatgttaggtcatcatgcctgctgtgaatggattcaccagctttctaccattcattgctagttactgaattttgaatattcttcccccacccactctacggataattgttattgtccagctccagagttccttgcctctgatgaaacaattgctgctgctttatgcagtagtttgttgtttatgtatgtgttaaaaatcttctgtgtgactttcaattccttacatcatcttgcacaatgagtgttgattgaatttaataaaacacaagctaagaaaagcatagtatttacacagtaagtgtatttacacagtaagtgtataggttttttttttttttttttttttttttaaccatttaagcctaaaaacaacttgataaagtagctaattgggtagattcctcaatttcaatgaaactgaggaaaattgggatttaagaagcttgtcttatgtgagaattaaaccctggtctttctgctcctgatgcccttgaaacagctaagtaacaaaacaggttcaaagaggaatgtttgaaagaaaagacttgaatttcaaattggcaagacagaattgttaactaacgccggccttgtgatttgaaatggcgaagtgagaagatgatggctacccttatttaagaattctatcagcaactcagttttggttcttggtagtgatatacattaaggttttagcaggaaaatttagtcatggagcaatttgttcttttggccacttgttcctttttaaagacaatgactggaccagactagaaattcttgaaataaagccaatgctagagaaacggagatcgactttcagaaacaaaaggctggtcctttgatttacagctatctgaggacatcccgaaagttcgcacacccaactttccaagatttcctagaaattggggaaacagaacaggtaatctggggagacacagaggaatagggttggggggagtagacaactatgacaaaccagccacccttcccttgttctttttattttcttattttttaataaccataattaggttatcgtgaagatactacattttcaagaggaggatattcttgccaagctacaacatggaaagatactttagaaagaaagaatgtgaagagcaaaaaaactcacttgctcatctacgaaactgtgtaactcatttgctcatttggcgtctgtggtgaatgattacactgtgttaacctctttgttcacatggtatttttcttctactggggcagtgttttaagttgttaagatgttactcatcaaggcacagtgctaggcactttatatgcattacatcttccagtccttaaacaacccttgaaattagcacctgtcatcccttttggtaggccaaaagtgttgatcagacagttttaagtaatttgccccaaggtcatgctagaaagtgatggagtccaggtgcaaacccaagcctccctagcgccttcctggcccgtttcctctctgggtggatgcccttgggaagaagtagttttggttggagagaccagtatgccttccctcatttcacctgagccagaggaatgtgccatcagtacctagcttctgtgtgaaaataacacctggaaagaagatgagtttgccagcagcagtttaaggaacaagagatcttactttcaaaggaaagtgtaattagaaaaagaaggagaacagagttctcgtccctgttgttccatctcttgcctgctctttcctgggctggtcagcttgcttctgggcctcagtttgtttatttgtaaaactgtgagacttctattatatcctaagggcctttgacctcctcagttctgcagttactaaggtttccacaagataataatctctttaaatcttgtaaaatttatacagtgcctgaaatgcctccttgtgtttatttatttatatgtctgtatccccacgcagttgcttgtggatagacaatgcatctgttggcttttgcatagcacagtgtctagaaatagtgtctttgcaaatatgaatgtatatggaataaaaatgtgctctcaagagatttatatgccgttgctgtttggtagcttgttagtaaccccagttttactatcttatctttctttggttattggcataatttttcaattctttttttgttaaggtgaaatgcatagaacataaaattaactcatttagtaaatacacctattcacaatgttatgcaaccactacctctgtttccaaaatgtttttcatcaccccaaaaagctgtacctattgagcagatgctcctcagtcctgcaaaccttccacccaccctcctgcctcagcctttggcaaccaccaatctgagttctgtttctgtagattcatttattgtgaatatttcatgtaagtggagtgacacaatatgggtgatcttttgggtctaatcctaatgctttcaagctttgtcagcattctagcttgtattagtgcttcattcctttttatggttgagtagtattctattgtttgtacataccacattttatccatccatcttctgatggacatttcagctgtttctatcttttgagtattgtgaacatgaacacatgtacaggctgctatgaacatgcctgtagatgtgtttgtttatgtgttttcaattctcttggatatattactttcaatggcaaaaagcaattatttttgtaccaacctaatacaactaaaagtggaattagtgggtcataagggaattttacatttaacttttttaaggaagtgctacacttttccacagtttctgttttacttgcctaccagcagtgtaaaagtttccaatttctccacaaacttgccaacatttgttattttctctgtgtgtgtgtgtctttgtcttttaatagccatcctagtgtgtgtgaagtggtatctcatcatggttttgatttgtattttcctcatgattaatgatgttgagcatctttttatgtgtatgcatgtgtttgtgtgttgactatttacgtattatctttggagaaatgtctattcatttagccatttttaagttgggttgtttgtctttttgttgagttgtgagagttcttcctctattctggatacaagtcctttatcaaatatgatttggaaatatttttcccattctataggatgtgttttcattttcttagtaatgtcttttgatacacaaaagtttttattttaacgaagttctttttatctatattttgttgcttgtacttttggtgtctacggatctgttgccaaatgcagtgtcatgaagatttacttctgttttcttctaagagttttattatttttttaagcttctataagtaggtctatgatccattttgagttgattttggtatatgatatgagatggggtccaagttcattctttctgcctatttggggtccctggaattttgataatattacattgactctagatcactttgagtattattgctagcttaataataaatcttccatggatgggtgtggtggctcatgcctgtactcccagtactttggaggccgaggagtatcacttgagccccaggagttcgagatcagcctgggcaatatagtgagactctggctctattaaaatcaatcaatcaatcagtcttctgtttcatgctactatttagcaatgttttgtagtttcagtatacaaaccatttactccattgattaaatttatttctaggtattttattcttttggatgctgttgtgattggaattgttttcttaattttctgattattcatttctggtgtgtagaaacacaattggcttttgtgtgcagatatgataccttgcagctttactgaattagtgtgctagctctagtaatttttttgtgggatctttgagattttctgtatgttgggatatgtcatatgtgagtagataaattttatttccaatttgggtgcctttctttttcttgcctaattgttctggctagaacttccagtacaatgttgaatctcagtggtgaaggtcagcatccttgtctagtttctgatgttgggggaaagtctggttcatatagtcttctgtctcatgaagtcagagcttatcaaagcatggtccctagacagcagcatccacaccacctgagaacttgttagaaatactcattcttggggattccctctaaactttccagttctgacactgtgcggagtggggcctagcaatttgtattttaagaaacgctttaggtgatgtggatgcacattgaagttgaagaaccactgtagcagagttcgaatttctttgaagttagtgtctgtactttattttctttgtattccttttagttcccttgtgggattaatcagtgttgaataattaaaaaaaaaaaaaaaaagaaattcagagctaaccaaagtgcctacattatctcttagcttgtgtaagagtcttgagtcactatgaatggttagagattcatcattagacatttatgagattcatcagaagatctcacattttgtatgcagtattagacccattgcaaacagcttaagtgtacttgtatttagaccatttgttctgataattactttcaccattattatctgtttacctactagctgtggccttatagctacttctgccagcaagaatttctgttcctcagcgatttaaaaagatggaagggtcacttttataggatatattggattttatcacatcgttatttcatctttgccttattttctcattagttttatcttgctgtgttgtgatatcaactcctttgcatcctttttgagcaagacgatatttaaatcaattaggaaaaaatgtaatctattgcaactaagggctattgttgaaaaatagccatttagtcatacaagtaccagtttatagacaagtccaataattatatgaattcattacctgtttacatgtattacatgaatactcagatgataaaaataccatttaaacgtgcctgaaattataatataattgattagtttatggctgatctttttctaagacttgttttaaatgatgatttataccctggattcccagttgccaccactttgagatttccaaactttatttgtaattcatctaattagtctagttctgtctgctcccagaatgggtgaatgttgtgaagatagcgtctgagatgtgtgagctctaggtcagtggttccaaccgttttggcaccggggactggttttgtggaagacaatttttccacggattgggggtgagggagactgtttcagaatgaaactgtttcacctcagatcatcaggcattagttagattctcataaggaatgcctacatccctcttcacgatagggttcgctgctgattaggaatctaatgcggctgctgatctgacaggaggcggagctcaggcagtaatgctggcttgcccactgttcatctcctgctgtgcagcccggttcctaacaggccacggaccactattagtggttgggcacccctgctcttggggatccctggtagcagggaagaaatagaggatgggcagaatgatcttgcagccttggtgcgggctcaggagctctccaagagcttgtgtggtcctaagaatacaatgttgctggtctttccttttgtctctttgatgtatgaatactgtcatagaatcattgcattaattaccattgattgaataataaaggctctccaacgtttctggttcaaggtttaagtaaatgaaaaataaactcattaacaaatgctagcagacttttaagacttttaggaactttaggaagagaaattagtgttttaattagggaaagattacaataatattggacattctcaaacacagttgagcagagatagtaaactcacagattgggaaataaatgtttaggaagacaataacttcttttcgtaccactatggtgaatgagattttattttgttagcttttaaactccaaattgcttatagttgtaatggtttatttcagaaaggagaggaacttggggttctaaggcaaggtagagttttggaaactattagtgcatatttataaatgtcctttgaaatagttttgatgacagtgacaaaagggggaacaaacatgttaaagtcatttggctactcttgaaatcaagactgtgtaaaaaaccttttctagctgtaaatcacatacttgtcctacattctttaaagcattttacacaaatgactttaacagttttaggggtcatgcctagggttaagagactatttgcatggtaaacattttggtgattaaaaagcaatactttattgaggtggtagcacctctgttcacactccgtactgtgaaacattttatttttacctaatgaggaaggattgttccctaagtcaatgttgtaccaagtgtatacttgttgattttatgttgcatgggtatggactattaaaaagctttagtacttgtaatagtaacaaaaaaatttttaaaaagcaaccaaaactatcaataaaattataaaaaccattgtaaagaataatgataactagtaacattttgatgagtgattattgtgccatgcactgctctaagcgcttttgcacgttatgaatttaatctttaaacctgaccatatgaagtaagaactgttattctcacttatgactattaggaagtaaggctcagaaaggctaagtgaattgttcagggtcataccaccagtgtgaatagtgagctggggaataaaaccaggcagaccacgctcttaacatctgctgcatcgagctgtgtacatcagcccttgaatttcacagacagtgctcaggatggcgcagacatcccattgtttatgatttatttttaatgaatcaattaaaatacaaatattgagtaaatacacaactctctgtatggctatgtcaaaaatgctgaagctgacgggaaaaatggttttggaaaccaatgccttcagcgattggtggatgtattcgtttaaattatacttaagaattaaattgggtcatgcagtgatcgatttttatgccattctcttcttttgctgtgtttattttttacagttatagagatgatcagatagtttagtgatttggtgtattatccgtgaatttggattgaatgcttggcacttggaatgttagacaaatatacaaatgttcttccctgctcctgttttctttcctatttcacagacttgttcttatgctcaccagtgtccctgtcccttttttccctactgagtcctctcctgtgaagtgatcataacactggttgtactgtgaagtgaaagatccattgtatgcacatttaaatgcagcactggatggcaggatctgccttttgccaaataaagtgttgtatttctcttggtttttgttccagctgagcaattttcattgccgacagcacaacatacattaggataaagcaaataaacaatgcaaggcacttggagccaggaagtcccatcttggactagaaacacaaagtttttctgttgacatttgggaggagggctgctaaataggcgagccagccaccaagtagaaaaccagtggccatgaggttcttgcacttctagggaaaccatttgtttaattgttagatctttgaaaggtgtccgaagttgattttgatgtaacagcggccagtttctttgtaattaaatattaactcaaaactatatcttgggtaattgttaaccttgccattcgttgtttgccttagacatgtaattaacattcattgaatttagctttttgttgttgttcacgtcttttattaactcatacacaattgcttgtcttctgtttttaaaaacgtttttgggaagacagagtcttgctctgtgcgcaggctggagtgtggtggcttgatcatgacttacggtagcctcgacctcctgggctcaagccatcctcccacctgagccttccaagtagcgaggaccacagacacgctccaccatgcctagcaactttttaaattttttgtagagatgggatcttgctatgttgcccaggctggtctcaaactcctgggctcaagtgagccactgcgccgagccttgtcttctggtttgttgaagcagtaagtcagacaatatttgctacaataatgtctgtcaaatgtttgtgactggccataaaaactccagcaccacattcatctgaaggacactgctaatgaaggccactcattttgctgttgtcatctaccttatcgtatctcaggacatccagcttaatctttttctattacgtttgttcttcttgggagtggtatgactacttctatgaagtcccaacacaagatgaagagtggactccttttgaatgtgtagttaagacagagtatgttcatctttcagttgcttgccagcaaagatcagtctctgctgatcaggagaaattccttctttattctggatcttggcctttggattttctgttgtgtccaagggttcagccttgagagtggtgctttttctgtaaggacttttacgaaaatctgcattttggtcgtggttccatcccagatggtggatcagaaagctgaatttcctactttgaaacaaatttcttgttaatttaatgctttactttgaaaaatccaagtaaatttggcattcatatttttaatagttccttattttaaaatatgatctaggcctgatgtggtggctcacacctgtaatcgcagcactttgggaagctgaggtgggtgaattacgaggtcaggagtctgagaccaggctggctaacgtggtgaaaccccgtctctactgaaaatacaaaaattatctgggcgtggtggcaggcatctgtaatctcagctactcaggagactgaggcaggagaatcgcttgaacctgggaggcagaggttgtagtgagccgagattgcgccattgcactctagccttggcaacaagagcaagactccgtccaaaaaaaagatctatttttttccccctgccttattcagttggtttggaataatttaaggatctcttctatttcaaattatggcatgttacagtaatttattaaaaatgataatctaactgaaaatcataaacccaaagtttgtaggagctttttaaaccagaatagaaaataattttataattgatttgtttaaatattgattaattatacattcttttaaaggccaaataaaaagaaagaaactttttgccccactctgttagactgctattaactgagcaatcttggtttatggaacttgaggttttgggaatcattaaatatttataaagatacttatagttttgggttttttgtttgttttctttgagttgtatagttggagaattccttttcatttgtggtttcaggtttagctttaaggcaatgtataccaacttttgaagaaagattgtcaaagtgattaattatcttcagtatggatagtacattgaaaacactgattattttgaatgatgcatgtttcttcagctattaacatctgactcatctcttttaggacctgctgaggttcccatgatgtcacccaatggatccattcctcccattcatgtgcctccgggttatatctcacaggtaatccatttgatggacttctctactcactatggacactacgttactccaacagagtatacgttgaggcttcaaagccatattccaggagttaatttaggtatcatagtgctagatttgccatcattttgtggcaccacatggtattacttgtgttttgccacttgacgtactggagagccagagaaaaggaaacgtagaaggcctactagactgtcctctggcaagtggcgtttttatgtttgattgattggttgtgatttctttatggagtctcctgctttagaaatttccttccacctgtaatacaactttctggaagaaaattcatagatttagttagttaacatattaaaggagacatagctcacataaacagggcctgcgttctgttatagatggaaaaaaatggagttccattgctccacgatgtggcaccacctgggcttggtgaattactgagtatgatgtgagaacttggctgtttgcatttaaatttctctgaggtttggttttctaagtaaaatgatggtaataggaatctcagagatctattggaagtgtaaaaaagcttaaaggatgaagttatgttcctgtgcctgaatgaggtataaaatgttttgcatggctggaacgttgtggacatctgtatatactttagatttttgtcctagcctcagcacaatatacaaatctcctgtttctgcacagctacctttccaaatacctaacaaactgtttttctctctttctgccttttttgttcttcctacttagcataaaatgaaaaatatttacaattttactctccagagatgataatcactgtgctaacgtttttttgattatatccttccagatggatttttcttttctttactctttctctgtctctcagcctctgcttttaaagtggtttaaaaatatgtaattttcagtttttaatgattttgctaggatgaaaaattggcagctacataggaaagttgctgaagcagaggcaggaatcaaagatttatccttctctgatataaaaacttaaccgtttcttcatgtgtaagacatatcgcagctactataatttcattttttccatcctttttttttttgtgagccaatttgactttatttatttattacatagccagattgctggccagttttcctgctgttgcaaataaatgacttattttacacaagtctttgtaaataagaatcactggagggaggatggggtgtagaacaggctcttccagcagggatacaagatgatggatcacattcacacccgcagtcagttaacagaaaagaacaaggaatgtagaattccattatgtctcctgctcatttattttgaggacgtgtttcattccattgaacagagtacagttctcaccactgggacagcaaaaataacaccaccttttatgctaaaggtccatttatggagtaccagttaaaaattgaacattctactggagagaagcttcagtgtgctttttcttgctagtagtattgctggggttgtattaaatgcaaaaatatttgttgcatgtactaggagaaatgaagaatttttgacttggatatagttctgattctggaaaactgtagaaaatccaaatagaaagggtaaaagtagagctgtaaacttgcttgtatgaaactgatgatggaagcgtgttgacgttctttcccagctgatagttatggcaaaatatgctagacaatattggaaaaatagttaaaatggaataatttgaattgagaaagggaaagaagcagtctgtaaggcatgtgaatgactaacttcatttcagttgggctctgtgaccagaagatgggtgcaaagttaaatgaccttcaatgatagtattatatcttttatgacatgttacagtagagtatctgaaaaagattgttaatatgaagaaaatagaattgagaagccaataggatgtgtacacaacatcatcttcaaggctggcagtacacacacttcagtgaaatgaggaaggcggaaccaagtataaaatgtcttagttgtctggttatcaccaagagataggagcaaaatacattgttgtcatgcagttgtagaaagaaagaaacacacacacacatacacacacactctccccctgcaggctggacatatgtgagttgtgctcagtactaatctgtccctctgctagttagttctgtacagttatccccacagtcctcttcctaaaatacacatgactttcttgttcaggtctagagttggttgccattacataccaatgtagttaaagttctgtagcatggtgtatatgatatccataacactcaacactgcttacctctcaagaggcacctttacctgtcaccacacggtctgtatgttaaacctctgttccctagataccttgagcctctttccagataaacactttcatgtccattatttccccctttctctggaatactctagagcctttctttgacaattcagttgttctttttggtgcctctcctcagtgtgacccttttagaaccttcatcacagaaatagttgttctgttttttcagcatctgtgattcttttcctccctgtcgtagaatacaatgtgtatttatagtcatctccaagaactcatattgcctcatggggattgtatctcagcatctagaatactgcctgacacaaagtaggtacttggctaaatgtttttaaatgtaaatgattgtctaagcataagtaagtacaggagagattcacatatattcttcaatgatttgcatgtttaaagagagtaatataatgcttaatagatggaaaataatatgagactgatctatacctgcaaagaatgaaatgttctgaatgtgtttttaaaagagagaggaacgccaagacagttcactggagaaaagaataatcttttcaataaatggtgctagaaaaactggatatccacatgcaaaaagagtgaagttgaacagctacctcacaccatatgcaaaaattaactcaaaatggattataaacagaaatctaggaactaaaactataaaacttgagatacgaaattttataaccttggattaggtaatggatttgtatatgtgacaccaaaagcatgagcaataagagaaaaaaatagatatatttgactttatacaaattaaaaatttttgtgcctcaaaggacaccgttaaaaagtagaagaggcctgggactgtggctcacacctgtaatctcagcactttgggagaccaaggcaggtggatcatttgaggtctggagttcgagaccagcctaaccaacatggtgaaaccttttctctactaaaaataccaaacaaacaaacaaacaaaaaaaaccaggtgtggtggcacatgcctgtcatcccagctactcaggaggctgaggcaggataatcacttgaacccagaggtgaaggttgcagtgaaccgagattgccccactgcattccagcctgggtgacagagcgagactccatctaaaaacaacaacaacaacaacaaaaatggaaagaaaattcacaaaatgggagaaaatatgtacaaataatatgtttcagaaagaacttgaatctagaatatataaaaaccttgtaactcaagaattaaaaaaaaaataatttaaaagtgggccaaggacccaaacagacatttctccaaagaagatatacaaatggccaattagaacatgaaaagatgctcaatatcattagccatcagagaaatgcagatcaaaaccacactgcaataccttaacatgctagaatttctacagtcaaaaagacaataacaagtattggcaaggttgtaggaaaagtggaatacactgtatgtgttaatgtaaaatagtacatctgctctggaaaacaatctggcagttcttcagatggttgaatagagagttgcatatgacccaacaattgcactcctaggtatatacctgagaaatgaaaatatatgaccacacaaacacttgtacaggaatgttcacaggagcattgttcataatagccccaaagtggaaacaacccaaatgcctatcaacctatgaataggtaaatgtaatataatatttcacacaatggaccataattcagccataatgagggataaagaactgatacatgctaaactatggataaaccttgaaaacagtatgctaagtgaaagaagccagacataaaagccacatattgtatcattccacttatataaaatgtctgcaataggcaaattcatagagacaaataaatcagtggttgccaggagttggggggaaggagtaatggggtatgctgtttctttggggagataaaaatgttctggaagtagatagtggtggtggttacttaactgggacactaaaacctactaaattggacactgtaacaggatgaattttatgttatataaagtaaatctcaataaagctagtacaaaagaaggggcgaggggaagacagtgacacgtcccagttatgaatcgagaaacaatggggcagctgggaaaatgaccccactttgaagttattggtggtggtgatggtaactactatgaatattgtgcactgtgctaaatggtttatttttatgtctagttttcactgtcccatctctacataatgaggatgctgaggcccgggttggtaccaggattgcagcctatgcatttctgattacagtgacctctttcccactatgatgcaatctcacagtctgtggcagaaccttgtcctgacggttttattgctttctggcagtgtgagtgtgggtgtgtgttgtgcctacttatgtatctccatttctaaaacaccagctacttgtgcatggtatggtctttatttatttacctttttaaaaaaattttttttgagacagagtcttgctctgtcacccaggctggagtgcactggcgtgatcttggctcactgcaacctctgcctcccaggttcaagcgattctcgtgcctcagcctcctgaggaggtgggattacaggtgggcaccaccatgcctggctaatttttgtatttctagtggagatggggtttcaccatgttggccaggctggtcttgaaatcctgacttcaagtgattcacatgcctcagcctcccaaagtgctgggattacaggtgtgagccaccacaccctgccggtatggtctttaattgtaagaaaattgaagagggaggcaagtaaaccaagattttacagtaataactctaatctgattgaatagagaagttcttgattatagcagatttgttgtataaatagctgaaagtcctttaaagataaattaataaaattggtcaaatctgacaaaatacaaatgtcattaataagcagataataaactcctgaagtttaacagacagctgtggaggtgccatcaacataacaagctttgttttcttaggttgagaagggccgaattggtggactttacagatactgtggacttagggtgcaaaaacagtggaatcctgtcatttcagctcggtggtttctctgatacagtaggttgggggaagtggtgtgttttgtgccttattttttagtgggatgagaagtagggggttcttttcaacttgagagaaaatatagacctttttttaaattatgagaaagtggatttaggtaagcgggaatttaatcttatcacagtcatcatctccattatgtaaaagcatttttgagtgtgattagagttgaaactgaaggagaacatggacattacttggagaggccttccttcaaattccaccttggctactttctatgtaactttgataaattctttcaccacatacgcgaacacctacttgatggggtagagagaagaattaagagaagtgttatgtgaggtgtggcactcagtaagtagtagctattacaatgaaaaagactgttacaacaattccaatggaagtttggcagagcttgccttcctaaatacatattgaaatcacatgatgtgaagcaaaattttcctttcattgtatactggccatggttctctgttttttaacctcaccattaactttctgaataatttatatgtaaaaatttcttaagcagatgctttgagttttattttccatgcttccatagtaatttatgacacattttttttcaaatgttatagggaaaacttcatattgacccaaagatttaaaaagcatacgaaaagaaaaagtgaaacatccaagttaatgttctatcatttgggaaactactcttctttttccagattaactgttgtaatcccaaaacttagtagtcaaaataaatatttttgttgtgagagtagaaagaacaaaaatagcacattggactgttttggggattaattaaggggtcagtacctgttgaaattatatatttcatttcccttagccagggaaaggcaagaaatgtattgaaaaatatatttaaatttgggtttggttggtcatttgccaatgatgactgtttggagagttggccagaaagctgaagcccctgtggagaaacagtggggcctgttaggtggaagccgtgcaatgcttttaccccatttcacccagccaagccagctgagctataaacattagcctcaattgcttccctttggtaactacagctggggattaaaccgccgctttgtttcaccttcaatgttgtgaaaatgatagcagaaaggcacatgggggattgccctgtgccctgagaaactgagattcaggcccatttggtggccaataaggggaactggattctctttcaacactttcggtctttcagaggaattgatttttctataggaagttagggaattgttccatagcgtacagagtgtgtgcatgggggttggtattgtgttccatggaaaaggacatagtacttaggtatcatttcgtttccattaccaatggatttgaagcaattttattttttatcttgtggcttattttgtccaaggagcagttacagacagggttgacaatgcttaattaaaaaaatataccaaggacatcccctcccctcaaagtattgtgcaggtttcctctttctgagccttctccccgttctgtaccttctctttgatttctttcctttgtttctgtgatcccggcattgtgacataatagaacacaggattagtgggaggaaacgaaggcccaagcaaggctctacatccaactgtctgtgtggttttagaaatattaagtgatttatttgggtgtatcacttgtttacttgatcattgtctgtcttccttttagcatttaagtccacaaaggcagggactttgtgtgtcctgttcagtcctgttcatcacttggtctcttctttcttgaaaggtacccagcatataataggcatgtatcaaaatttggctatctgactggagtcatttttatcttgtggagggaggcagagaggggaaagtgagcatctctggggttcttttctgatctaaaattagatgattctcctctgttcatattattccttaacagggtatcaaatgagactgtaagtaagtttccaaaagcagtcattaccaaagcagtgtggcacactcattgatatttagcatttgattgactagaatgctagttgtcacctctatacaaaaatgatagttgattttcatagtaggattgacacattattacatccagaaatgacttcggagtcattagtgttaaatttgccctttatattacattttatttaattgcacaattattataatctatctttctaaattagtaagtcatatttgtcatatgtaataacttttttaagaaaaacacctttttctgacctgttgggtagcaaaactttaccacggttagatgaattttacatttctacacattctttgaaactcattaagttcacaaaattagaattatataatatggttattttaatctgtgataggtgttatctgaatatcttcagtatggattcttaactttttattgtactgaggagcccattggcagtctggggaaaccttttttaaagtaaaatataaaatccataggtacaaagaccaggtttttcaaaactggtcaattttttttaaaaaggtgatacagtaatttttgtgctgttttattagcacattaacaacatctagcatcagatctagtaactataataattttgaagttgtgatgattataaagattaatatttctataacactgtaatgtgatatggaaatgtcatattttgttagtaacaaagtcaaaggtactgctagtactaccttgatttgctgcctacatttataaatcagggaaatacaaaattgcagttggatgttagtgagtaataaagatgtaatttctgaggtcatgatcccctgaattctgttcttcttcttttgtgggggataagggtctgggtacctggttaaggctcttgcccctattggtgagtagtaatagtatgtttgaaacttagaaccatagctctgttactgggaagggcccagactgatttcttgattcctcatgtctaatctcataatctgagtgggatagtacagcagtagaaagaccatgggtttcagagtattccaaacatgggctctacactgtacagctacaagtagagtaaccatgaaaaatattctaacttcaggctttgccttcatttctggaaaggtatagctgtatccttccctgcagagattgtctgggctgtctcacaggtgtgaaagtcttgaatggtaacaacttctgtttaaggaattattttatgttgatgaatatgccagttgcctgttgggttaagtctggaagaccctgttctgtgtattggcatcactggaataaaatggacctgagtgtgcctgagaagctggaatgaaaagatgtgactggccatctcttctgtgatgggtaatggacaggcactgcagatgcccactggggatagctttattcacatctcagaagcagctcaactgggcacaaataaagccatcaaatgtctacatactgtttgtcacctaacaaagtctgtcccctaatatagcatttctgtttaatctgaaataattatttgatccattttagtatcgactgaaactcaatggatggaacttttttcacttgtccagtgttcttatgtgccacacattttttgggaggattagatttgatttttaattttttaatttggttctttttggtatttaggtcagtaatatacaataaagtgtgaaagaaatggaatggcatttccagtgagagtatctgggtatgaatcttgtcacccagttagcccgccttaagttaatttacttaatcatagctgaggattcctcagctagaatttaggactgtgatgctgcttatgttagatcttctgaattttatgcaagtcaagttctgtgccaagtgttttataaactattaagtgatatacaaattgtaggagttgttattgtcactttgattcttatatcaagttaatttgctgttttgctttcagcatcagtgcccggtactgtgttttttgagcccctggtttgagataaggcctcttggttctctgcagtatctggagaggcttagccctctaaccagggaggggttcctctttgcccatgggattctctatttggagacagctctgggctatggtaaagtagagctgtagctagctaactgagggctcatcctcgggtctccagttcataatatgtgtctcttgaccttgctgaacttccttcttaatttagaaagtcttaataatttaattggcccttccactatagtgttacataattcactgaagtagttggatcacagagataccacagagatctgtgtttgtttccattctcctgtccagccctcaagggttactgtcattggacagtagcacctggaaagagccaggtgtgtctggtaaagtactcacagttgatttcatttatatatgccttagcagtgcccctgtgcaagatttaaaacttaaataagtgtgaatagaagcttgactttttttctgagtgtataaaagtgttcgcatgtacaaagccagtggaaggattgccatttttgagagtgttcttatactgatcacctctgaaataagcctgtgggtaagattcatgcccagaaatgctgaagacaagcaccagtaccttcagtaccttcagctgtgattctcctgaacagcaacacttgatttgttaactggaactaacccttctcccctgaagtctgtatcatacctattgcctgcaattggtgtgtgcgttaaaaattaagcacctgctgggcggtgtgtgccttacaggccagaggatcgcttgagcccaggagtattgggctgtattacactattctgacagggtggccgcaataagttcggcattaatgtggtgacctcctgagagctggggaccagcaggttgcctaaggaggggtgaattagctcaggtcagaaatggagcaggtcagaactcccatgctgatcagtagtgggaacacgcccatgaatagccaccacactccagcctgggccacacagcgagaccctgtctcttaaaaacaaaaaaattaaacaccaatgggttgggaaatttaagatttctagacataaatgagagtgctcataaaaactctggggactttttgttcattcatgaattacctgattagctaaaacattcattttgatcacctataaaacagacaaaagtaggtatttagacttaatcactggcaagaactatttgagacagacaattggaattttcaaggaacttgtatttttcctgattcggaagaggatgtctattatcaagctgtaagtactctgcaggataatcttttttgttctcatttaaaggacttttagaaacctagaaacatcaccagtcatttatttttccttttgaagacaacaataatcatgttgtgtggcaaaaggagctggtcctaaacttagaatgataatgaaagtttgcaaacatcaaatattatttcatcactgttagccatttatagatgtgaagagaaatgagcttgaaaagtactttgatgttttcagccacacttttaatctttagatttgaaaacagaaaaggaagtctgtatattagggcaatatattcaattcttccaccattttttaatttttattttttatttttttggatacagggtcttgctctgtcacccagatggagtgcagtggcatgacctcccttgctcaagtgatcccccgacatcatcctcccaggtagctaagatgacaggcttgtgccagcacgcccagcaaatttttgtattttttatagagataaggttttggcacattgcccaggctggtcttgaactattgggttcaagcaatcgccctcctcggcctctgaagtatggggattgccgtcataaaccaccacagccagccctctcccaccatttttaagtcaagtagcttaatctataaaataaaatgtttgaccacttactattataaaactcttttgttgctcctggaacattcctttatcctaatttttctttcttcttatggtacttgggtgatggtggtgagagttggcagcacaaggggggttggctagggcaggcacagaccttacatttcaaatctctaccctacttgaagaacaagcttgcctttcctcttttatattatctaccatattcagaaatgcagagggaagagttagtgcaaattgttaaagtgagtaccgatgcatttgtactcctgattggtgagtaaaataaaactgctcagtctcctataggattaaagtagaacttaacattggagatgtttgatctttgtgtgtaaatgcttgtgataaaatcatgcttatttaaaataagatcaggaatgatagatataaaatgaactggattcagattttctgtgattttagaataggatgtcagctatttaccagagttacagagaaaagttttaataatgacgtgctaatattcttggcagataccaaatctaagcaggtatacttaattcttttatttatttatttatttatttattttagcttgctttcttattcatttactcatttaaccaacatttactgaaagccttctgtgtgcccagttgcttctgagggacttgcagctgggtgggagagacagtgtgtagtccaagctacaggggagatgtgagcaccagcctggttgggagagtcctggattctgcctacccatcccctgagtccatgcagcttatttatatcatcaaacctttttcttctctttgttcgttgttcgcatgcccacttttatctgagacatcttctcttcctggaatgacctgggaacccacttcaggcatgttggcagcaatgagaaattcagcctgagcctgacttttgcaaactcatttggtcccagttttctgtgtccaggcaactcacccaatgttttttgccaccccggcaaactggctgccagcacatcacactacgtacatttgtgggttcatatgtgccacgtgcagagtctgtccatttcctggctcatcctgggccatctggggcagccttttaaatttttttcttttgcctcctgcctttcaagcttctcttttgattcttgtggcttgtagcccagcaagagtagaaggaaagagcttcaggaagtgaggagtttattaaaattcctttgaagcatttcgattccgtaagaggaactaccttttctgttagctaagacaaaaaacaaaaacaaaaccaaaaaaaccctcaaaaaaatgtttttaggagatccagtttagttcttttttttttttttttttttgtgagggacagagtctctctctgtcacccaggctggaatgcagagactcgatctcagctcactgcaagctccacctcctgtgttcacgccattctcctgcctcagcctcccgagtagctgggactacaggagcacaccaccgcacccggctgtttttttttttcttctttttgtatttttagtagagacggggtttcacggtgttagccaggatagtcttgatctcctgaccttgtgatctgcccgcctcggcctcccaaagtgctgggattacaggcatgagccaccgcacccggccccattttagttcttgtacacaaaattgatcctcctttacccagttcggtgttcttcggtgtattactttcacttccctaagcatcattcttcttatttctaaaatggggataactgtaactgtatgtgcctcacgggattgttgggaggatttagtgaagtggtaatattaatagtagtaattgatgagtaagattttgtcatattatgtatcagctactgttctaggaacttaactctgcctgactcctttctggtagagtgtgttaaagtatagcagtattcaataagtattagttgtatcctgaatccttttcacatctcttaatgactcaggtatcctaattttcagcagttgattgtttacctatttacttctcaatgtacaacttctgtgtaattaaaactttgtgtaaataatgaagactttggtgtacacaccagtatgaaaaatcttggtcctgcagcatactagttgcacaatttaatcatgctgtgccttggttttcttcatctaaagcagggatgctgatacctaattctcaagtgttagggaagttgaatgagctggcccacgtcaagaagctgacagaccacaggcactgactgatgtccttctccatctcccgtcctgtgctgctcctgggaactctccatcttgctgttatccccaggctgtttcattttgttttaatgattctcttggtcatatttacaagaacactagtataagacaaagattctttctgttgcacattttgtgccttattctctagccacttatttttgtttctaggctacaggatagcaagaatactaggcatgtagaagttttttggtaaacatatactaagctggataaaacagacttgataaagaatcaattcggcttctctttgccatcaggccgaatttcttcattagcctgagcaaaatggctcagtgtttgttcacggaggctaaatgcatcactttttaaaagagagtttttgtttgtttgttttaaatcagacaaggcttgtagaacttaaggtagaaaaaagcgctggattgagcctttgtattctgaggggctgtattagtttagtagggctaccataacagaataccacagaccgggtagtttacactagaaaaatttattttcttacaattctagaggctggaagtccaagataaaggtgtcagcaggattagttggtttcttctaaggcttctctccttggcttgtagatggccattgtatttgtccattttcaagctgctgataaagacattcacaagattgggcaatttacataggaaagaggtttaattagactcacagttccacatggcttgggaagccttacaatcatggcagaaggcaaggaagagcaagtcacatcttacatggttgacagcggacaaaaagaaaaagagcttgtgcaaggagacttctgtttttcaaaaccatcagatcccatgagacttattcactatcacaagaacagcacgggaaagacctgcccccatgattcacttacctcccactgagtccctcccacaacatgtggaaatgcaagatgagatttgggtggggacgcagccaaaccatattgttatgtacctggcccctcccaaatctcatgtcctcacatttcaaaacaaatcatgccttctacagtccctcaaaaccttaactcatttcagcattaactcaaaagtctggccgggtgcggtgactcatgcctggaatcccagcactctgggaggccaagacaggtagatcacgaggtcaggagatcgagaccatcctggctaacatgatgaaacccatttctactaaaaatacaaaaaattagccagcctggtggtgggcgcctgtagtcccagccactcggaaggctgaggcaagagaatggcatgaacccaggaggcggagcttgcagtgagctgagatagcggcactgcactccagcctaagcaacagagccagactccatctcaaaaacaaacaaacaaaaaaaccccaaaagtccacaatctaaagtctcatctgagacaaggcaagtcccttctacctatctgcctatgagcctgtaaaatcaaaagcaagttagttacttcctagatacaatgaaggtacaggcattaggtaaatacagccattcgaaatgggagaaattggcccaaacaaaggggctataggccccaggcaagttcaaaatccagtggggcagtcaaatcttaaagctccaaaatgatatcctttgactccatgtcttatatccaggtcacactgatgcaagaggtgggttcccatagtctcgggcagctccgctcctgtggctttgcagggtacagcctcactcctgactgctttcacaggctggtgttgagtgtttgcggattttccaggcatgtggtgcaagctgttagtggatctaccattctggaatctggaggatggtagccctctaggcagtgccccagcagggactctgtgtgtgtggggggctctgaccccacatttcccttccacactaccctagcagaggttcttcgtgagagtgccacccctgcagcaaacttctgcctggacatccaggcatgtccatacatcctctgaagtctaggcagagattcccaaacctcagttcttgacttctgtgtacctgcaggctcaacacctcatggaagctaccacagcttgggacttgcaccctctgaagtcacagcctgagctgtgccttggcccctttcagtcatgactggagtggctaggatgcagggctccaagtccttagattgcacccagcacggggactctgggcctggcccacgcaaccattttatcctcctaggattctgggcctgtggtgagaggggctgccatgaagacctctgacataccctggagacattgtccccattgttttggggattaacattcagctcctcattacttaagtaaatttctgcagcggtcttgaatttctactcagaaaatgtgattttcttttctattgtattgccaggctgcaaattttccaaacttttatgctgtgcttcccttataaaacttaatgcctttaacagcacccaggtcacctcttgaatgctgtgctgcttagagattgcttccgctggataccctaaatcatctctttgaagttcaaagttccacaaatctctagggcagggacagaatgccagcactccctttgctaaaacataacaagaaccacctttgctctagttaccaacaagttcctcatctctgtctgagaccatctcagcctgggccttattattcatattattatcagcattttagtcaaagccattcaagtctctagggagttccagactttcccacattttcctgccttcttctgagccctccaaattgctccaacctttgcctgttacccagttccaaagtcgcttccacattttcagatatcttttcagcaacgtgccactcttctggtaccaatttactgtattagtctgttttcatgctgctgataatgacatacctgagactgggcagtttacaaaggaaagaggtttaattggacttacagttccacgtggctgaggaagcctcacaatcatggtggaaggcaagaaggagcaagtcacatcttacatggatggtagcaggcaaaaaaagaggttgtgcagggagactcctgtttttaaaaccatcagatctcatgacacttaaatcaccgagaacagcatgggaaagacctgccttcatgattcagttacctcccacctgtgctccctctcacaatatgtgggaagtcaagttgagatttgggtggggatacagcccaagcatatcagccatcttcctttggtgtcttcatgtagtgttccctttgtgcttatctctcgtaaatctcctcttacatagatactcttggattagagtctacctatataacctcatttcaccttaattatctacttaaaaggccctatttccgaatacagtcacattctgaagtactgagcatcagaacgtcaacatatgaatttggggacacactaagtcagcccatgataggtgacagactgagaacctggcataatgatcttttccaaggttctgtgcttctctggagaggatacatgagtgacagttctgttgagtcatagagctgggaaaaatttagatgaagaatacttactctgacttctgaagtcaccacacttctgctttcttagcagcacttactaggacttagtctaatttttctctttatattcttaggctgtgtggatgagtcttactgttgagcacttactttttctcgcctttgaatatccagtccttagcacatagtatgtgtcagtaaataatagttgaattgaatacaggtgattcgtctgcctctggacattgtcacaatttcctccaccacaaaaggaaatgaatttgtcttttccatagtcatctaccaagactgaaggcatatttttttgccttgggtgttttggactgaattctgtctgatgtctaaatttgactacagtgatatatttatttataaaccatctttattaaagaatgttattgccaccgtttcctttgttgccaattattttgtgcattgttattgctcctcagattttcttattttgggggagacttaggcgtaatttccttagatgtagatcaaagctgaattggataactaaaatatgttgcaatttatgttatagaaaaatggtaaaaatattcagcacatattttctatatttctatttcagaattaatatttcagcttttttttttttttgagttgaagttggagtctccctctgtcacccaggctggagtgcagtgacgcgatgtcagctcactgcaacctccgcctcccaggttcaaggaattcccctgtctcagcctcttgagtagctgatattacaggcccatgccaccacacctggctaattttttgtatttttagtagagatggggtttcaccatgttggccagaccggtcttgaactcctgacctcagacagttcacccacctcggcctcccaaacttctgggattacagacgtgagccactgagcccggcctatatttcacttttttaaaataaatctttttaatgataagacaggcttgggtttatcaagaacaggtttctaaaagggtttcgttatgcatgcacatgtaaataaaaaccttttacaaatcccacagaataagattttaaaatggagctgtcaagcaatttttatatgtgtagtcaatttgtggtttcaaaaagctacttcaaaaaaaaaaccttcaaaaagttagtgctttttgataaattttttttcaaaccactttgttaacaggtccaaagttatatgataaaatggtcaaataaattcttttcattataagtaatcttgtttaaaagtccagagtgttcctcttaatatttagtgagagccctgttcttgtacttcatcacttgtctatgttgctggttgacggttggaagttttacactgaatgaaagaattaagactgtaaacctctagaaaacaaggactttacttctgtggtccttccaggattgaatgaaggttccatgaaagagaaacatctagaatacacctttcttttttcttaatagctagtagagggtgaggagggaaagaagacactgtaggataatgcatgtttatgtcagatggtaggaaaaattcatgacgtatttatactgcgtgtgctaccaaacagcatacagctacacgttttagacaaaagaagttttgatgataattatcaatacatgcatgagaatttccaatgtcatggtttaagcacccacttcacatacacctgtaaattagcttctgtgcattcataaatggggttagtgtgattagcttgccaaggcccagaagagattatatttattaaagatcacatgagaagttgtgtcctaggcatctgactaggaattttaattttaaatgggtaatattgtcttattaatgaactattaacatagtagaaacatttattttgatagatttattaatgaatgtaaagattcttgtttttttaatataaggattaatgaccgttcattcaaactaaacctattttgtacactgaaatataacataaacgttgatagacttgccaatctgacttaagcactacttttaaaatatgaagctaatacagttttttgttgttgttaagatgttttagacatgttaagtcattttattttggcctataatcaatctcctgaggtataatgagaaatccatttcaatatagaaagtcagttttatggggattttagattttgttttgttttttttaaaacaaaacttcctgtcagaatgtgtgcctgattgtctcacatatttgattagatcagctggcatggctccttggcagcctggccctcgctgccagtttactctgtgtccccttccttgcagggcgctgacccggaggccatctctcagctgtcccagccctgccgattctttgaggtccctgaagcctttcctgattctcccatctcgtgttatcattctctataccctatggctttaccttttgatcatggtatctgttgtgttagttattcctttcgttgtgtctcaccaaagttgttggctcataggagctggtagagtgacgccggccacagaggcaataaatattggcattgtgctgtcttcattgcttttcttggatgaataaaaaaacattcagaggagctgggcacagtggtgcatgcctgtagtcccagctactttggaggctgaggcaggaaggtgacttgaggccagttcaaggctgtagtgtatgatgatcacacctgtgcgtagccactgcacttcagcctgggcaacacagtgaaatttcatctctaaaaaaaataataaagggaacaaagaattggaaaaagaatgcatagagtgtggattggcttgctttactcataacaggttgcttttccaagcatcttctttcacaacactcattatcaggacatcttgggagcaaaagtgtccatattgatttggggttacttatgtttttctttggtcagaatccctcgtttcatccatgtcctcagtcctagattaagtaatctttttgtgcacatttatagcttctgacgttaatgcctccattgtttcctaaagtcccgatgatgatggaactgtgcatattaaagcaggaatggggcagaatgttgtcaggcatatctaaaagcctacccctggaaaagtacttatgtggcacagaaagcctctttctggaaaaccactgaactgatagttaaattcaaaagtcactcttaaaatcagtttaagcacacattaaattcacttgtcttggatgaagccagtgaacatgttaaggcaaaacaagatttattatcaaatactggtctctccaaaaagttacatgggatcagaatcagatgttgatgaataatttgtttttgtacgttttaatagttacatgttcttacttctagagctcatttaactggttgaactagagaaccagaatacaacatgatttgtgtttttctgtggtggaagagaaaaataaaattaaagtggaagttattaatactatctatattcacaggctgctaatatgtactgcgttctttccttttgtgtttttcttcaggtgattgaagacagtactggagtccgtcgggtggtggtcacaccccagtctcctgagtgttatcccccaagctacccctcagccatgtctccaacccatcatctccctccctatctgactcaccatccacattttattcataactcacacacggcttactacccacctgttaccggacctggagatatgccacctcagttttttcctcagcatcatcttccccacacaatatatggtgagcaaggtaagtagattcttgttggcatcaggagccgttgaaactggttacagcatttcaatagttcaaggcggccctttgtttcttgtgaaataagcagagtagaaaaggatctaggtggtttgtaagactcatgaggaattcctagtttcctttgtcctgcatggtgccttggaaaaattactttgtgggtttagttctttttctttctttcagttttcccaaactcagccccaacccccaccttacaagatcaaggagtaaggtagccaccttttattttagaaaagtggcaatgtgacatcgttcccatgtcctgaaagcatgtttttatgtgagagtggcctgaggtacaactgtggcacatcgttgctttggtatccatatgatctaccagttaaagggaaattgaaaggtgttttgtgccccatttccaatgtttgaagattgtgaagtctcagcaacctttgggtttcctgaaaggctctatgttgtgatgttggcagaactaaaaatcccctggctgttgatgtggccttcctgaacctgcttttagtttaagactagccattagtgcagccacaatttcactggttgttaggcaaatacttacctggatatgaaaagagtctcagaactaccaacattatatctttttaaagttttgaccttggtgttggtttagtctaaaggctttctctatcaaaatggatcctgagaaaccagataattgaaggtaaaattagactttagcctctaggactttacaaagtgattttcttctgagtctgactatgaagggaagcattttactgcttcagacatttattatgttggtttagatacattgtagaagaaatgcctgttataccatagaatgtttgagcaagttattacttttaacagttatatatatatataattatataatttctatataattaattataatttataattatatatatttttatatataatttttccctgttcatctcacattataacttattcacagaaaaagcttttttgagattttttgagatggtatttcaagcgaaatatactgttgtaacttagggatagaatttgactgtgtgtgtgttttgtttgttttttaagtagtcaaagaaatttgacataattcaaattaatcaggtgctttcacagtggggtataaggggatgatagcaaaacatgaaatctatactttgattttatagcagcatcaataacttcctattaatttgatcttttttccatgcgacataacaccaagaaaacattaagtagtggggatatactatgaaaacatttggataaaaactgaaaaaatttagttagctgtaatttttttaaatgtattcagtgctttgacacaatatgcattaaataattgagtgtttctcagagctttctggctggatctgagctctgatgacatgaaagtccttggtgactgacgcactgcctgctggtgtatatctgacttgctttattttagcagtctgttagtaggatgccacatagttactgttttgtaaatgctgtcctttgcaattttaggcaagacaacggtataatttaaatcattagagttaagcacaattgtagtctcttcattttgtggtgtatttgggtctaattccattaaaataacacagagcaataatgtatacaaataaaaatgccttcattgatttcacattaaagcagtaaaccaaaatcccttcgctttatacataagccatttttatattctttaaccttagttctttagtgtgcatacctaaaagcaatttaaatatgaattttctaaactataagtgtttaaaagttttcaccatgtctgaagagatgattagtgcctgcggtgaatatgttaaatctcatgtgtaatgcatcgtggcatttagaacatttactgtccttctggtatattttgacattgtttatttggatacatactgtctgaataggattatatttgttttgacacattctctagtgcaaactggttctctcatgaagatttgatttttcacaaaacaactcgttaaaaaacaaatcttcctttagctatgttaacagtaagaaacagtggagctttaccgttgagtaattgagacagcagttttgttaaattatgcagggtaaccatacatttctgttgtgcctgtgacagtcctagtttaggtctcttgccttgaagaaattgttgatattcctcccttttcactgtcagaagtgttcagatttggatggtaatttatattgtcactccatagatgaggtgacccttgtttcttatgaagatgtaaggacccaatctttatgttacgcattgtcatttttactgatacctaaaaataattgtgaactgatttaaaaatttaaatttaacatgaagttttccccttgaggtcataagattgtttgcaggcttctgttttcttttgagccactttaaaacgtgcgtagtaaagtcacgtggcattctacatttgtcttgccttcgattactccaaaagagaagtttgagaccacagcttattacgtttggcaccagatttcagagatagcttttcttaacccttatacttcctccttgaacatttcccccgattctgtgagctttgattattttaaatggaaatgtgtcatctcattttcttagttaaatttgttcaaatgttggctcttttgaatgccacaaataacttaaactttgactgcaatatactttccagtagaaatactattctgtctacagggataagtagacttttaaagtagcttgattctaagtacatgtttaatgggggtattttatttgttctaactttttcatgtattgcaactactgaaaacataatgaaaggcaaaaatcaaagtcagttataaattcaactagaatatgaactctagggataacaaccttgtcttcagtattctctgtaatataggaaattttctgaacgcacagtatagtttttaatgattgattattccttgattgattagaaacaaatgggaatgccttaaatgtatatcatgtatatggcattttcttttttcttttttctttttgaggcagagtcttgctctgtcgcccaggctggagtgcagtggtacaatctcagttcactgcaatctccgcgtcccgggttcaagcgattctcctgcctcagcctcctgagtagctgggattataggtgcccaccaccacgcctggctaatgttttgtatttttagtagagatggggtttcaccatgttgcccaggctagtttcaaactcccaagctcagacagtctgcccacctcggcctcccaaagtgcttacaggcatgagccaccacgcccggcagtattttcttaagaaatatttattatactctattcagtaatattttagacttcttttatactttagacttcttcaggagccagatcgtttaaccatttaataatttattactgaaaatgtaaactgagtttgggtttatcataatcatccattttagaaattataccactttatggaatgtcaagctacatcacccgagaagaccagtacagcaagcctccgcacaaaaaactgaaagaccgccagatcgatcgccagaaccgcctcaacagccctccttcttctatctacaaaagcagctgcacaacagtatacaatggctacgggaagggccacagcggtggaagtggcggaggcggcagcggtggtggtcccggaattaagaaaacagagcgacgagcaagaagcagcccaaagtcgaatgattcagacttgcaaggtaatactcaagatgtttgccatagagtgaattatcaagacagagacatctcaaatgatgtttccacgtcttttacatgagaatagtatttcatggtgcttggttgttctgctaagaatatttgagtagaccttctttgatctatttcttagtaaggaaagaatattgcattgtttattttttattaatacttcagggcagaaatactacgtttggtcacatatgccatgtagctttctacttagtaacaagtatgtgaaaatcttttcatgttagcctacttctgttgtttcactctctgaatagacagatgtggaagaaatccaaagataatttttctaaaagtgtaggctagtttaaatctcacaataattatacctcataaaccatatgtaattacttccttactgtaatgaaatctgtcattgaatcacagaaatatgtttctctttagttttcgcatcagttactgtctcataccaccttttgcctgtgaattaagtgtttggaaaccaagaatgagatggaagaatgagggtcaccacatatagctagagaaacatcaactcagaatggcacgtgtttttttgtagatgaatctcttgggtatagatcagttgatttggaggaaggtttttgtgtttaaatgaagttttgggggtagtttagagagaacctattttgatgccacataaggaaaaacagtgactttttctataggcatagggaagaatgacttaagtgaggcaaaaaaggtaacatttggataaggtaggtgagtttatagatagaaatgactggaaagcaaagacatgaacaacttttaaagataggattcaagtagattccctttttcattcacaatcacattctcacagacagtccccatttctacctgactgagatgcaataaggaatctgattataacactcattgattataacactcattgaatttatggattccttactgcatctcattcaggtagaaacagggactgcgtctgtgagaatgtgattgtgactgaaaaagatggaatttgtgtatttttgagtgtctacggaagagcttctgacaagggagaggaaggttaggtaaaatgaagtattgccatcaacatttccccctacgttatttgggtgagtgattgcagcatgagagagaggaatagtaagataacagtgaaatgtaaacagatcatgtgttcttttcattttaattatttattcttttctctattttccacactctatgcaattaccatgttattcttataatttttaaaacataaataattatcatacaaaggaaattgaagattcaagaagcttgtacatagctcttaagggaagatgctgggtctcatataataatttttagtcaaatgatactgtaatttctaagcttgaaattagtttattagcagtgttgcaatttaaccatgactatacaagaattcataccaaaaaaattaagaatagattttcctaaagagaattttaatccaaagaaaagcgagagagaatgtataaattgtccagagagcttacgaggtttgaagtactttgattacttgactcattctttaataattttcaccttgctttgcaccaaaactgatttaaggcaaatgacgtagacacatagaagcagataacataaatgtaagcattaagcagccgaaagatgataagggaaggaaaatactaataagatgaagcagggttccagtagagtggcttgatatgggccatatatttggttttgagcctcctggttatcaaagcaaaaaggcaaatgtgaatcacgtagcatgaacaaagaataaagcacttcttgttcgtggggtccatcaagtggctcataatgtttcagttgtgtctgcctcaaaatgtggttgttggttcctaggatcccaaaaggctttttcctgctttctcatccttacaagtgtgtctcctgctggaggttactgcacctgacatctaaatctgtaccccagaaacagacttcttaactgattcttaggtttacagtgccacctaattaatctaaaactatacttaataccagtatgataaacctgataggttcatatgtggtttgcacaagaatagaatatatacttaaccataacatgtgacttgtgtgtttttttttttttttttttttaaatgttttacttaggttaaattgccctcatggccagaagagataaatctttttactttttttttgagatggagtctcgccctgtcatgtaggctggagtgcagtggtgcgatctcagctcactgcagcctccgcctcccaggttcaagccattctcctgcctcagcctcctaagtaactgggattacaggcatgtgccaccacaccctgctaatttttgtatttttggtacagatggggttttgccatgttgtccaggctggtctcaaactcttgacctcaggtgatctgcccacctcggcctccttctttttactttataattccttaacctttgagttaatttacttgaataatttacctttttaccacttacaaaaaacaaatctttaaaaaaagacaaactttaagtttgtgcctggtcctgtggtaaaactaagcacatgtaaaagaagcaaacaactcatgttaatataaatacatgtattaaaaagatggcgataccttaatttctttcttgaggtctagttctctcagttaactgtgcttcagaaactttaaaacaatagagattcgtggaccccattttagacctagtaaatcagaatcttcacaccacttttgacttcatgttttttttttgttttgttttttaaataaaacctccattggggataatgtgtaatcagccaagatagaaaattatactatcataataatgaggatggttcatcaagttgtacacagtatagaataggaactttgtgttttattcatcaatctctccctccttctagtactatacctgacacatagtaggtactcagtaaatagtgttaagtgagtcctgttttcttaattgccttgttttccagagcaagccttctttttgaacacacaaagctattgtaccatttccttttcctggaacaaattgttgcattgctcaaggaaactgctccgtggctagcctcccctttcatttactattaccttcaggaaaacaggcacgacagactcccatagtacactctgagaagtatgggatctctgagttcttgcacttccttggagcaaatggtgtggtgtgagccgagaagagttggggctttggtattagacatacagtacttggcttagaattgggctttgttacttactttttccttttagtttttcctgaatttccatgttcacatttgtaaaatgggcacttaaatttccattattaaatattaaaaatacccttgctcagttcttaacactttaatataatggtaacccttatgacttgaatattgtctctctcatcttcaggactcctgttattataggatcatgtctcatctgagatagctgcccctcaaaataggcatctctctctactatccatctggcggcttttccccttcccttcatgctccattcccctcaccccagccccctacatttcttctcctttaagccagaagtggctttctttgcttaaacccatcttacatttttgaaagctaaaccctgcattactggcccactatctctgaaagttgcttccaggctcctcttcttttttttttgagacggagatggagtttcactcttgttgcccaggctggagtgcaatggcgtgacctcagctcagtgcaacctccacctcccaggttcaagcaattttcctgcctcagcctcctcagtagctgatattacaggcgcacaccaccatgcttggctaatttctgcatttttagtagagagagggtttcaccatgttggccaggctggtcttgaactcctgacctcaggtgatccacccgccttggcctcccaaagtgctgggattacagtcgtgagccattgcgcctggccaatttttttgtgttcttagtagaggcgggattttgccatgttggccagactggtcttgactcctggtctccaactcctggcctcagcctcccaaaatgctgggattacaggcatgagccaccgtgcctggccacttccaggctcttttaagagaggttgccactgtgtagaaacatacccaatatcctggggtcctctctggtggaattggtaccggatctcatacatcttctcgtcacctcgtcctagggcacttccagctccaagcgagaaagaactctggtacacagcctcttgggacttcctttctcatggtgtctggtatctcctcatatgttttttatttttcactttgctccctctgaaccttaagagacctcccagaagggccaccttatggtttaagatgtgtgattattaattttcctctccagtacatcctctgttgtggctacagttaaatagatctcaacattttaatccctttgtgagaacctctgtggtgccccccactatctagagaataaagtctaaactgcatgatatgacacaaactaacttcttgtggcccttcagatttccccaccagacatgctcgctgtgttctgccccgttttgtgaatatgcctcattcccttttcttggcctgtccttccagttcctctgcctagcaaactccaactcaggccttcaagagccagctcagttatcacctcctctatgaaggctgcctgtctctccaacatattatgatggcagataagttaggggaaaatatttcaagagtttttgccttccttttctcttcctctcccagcatttcattttagaatagtgcttggggatcaagtccacagatgttcaaggataggaatggaaaaatttgttcttgtgtacagagtattatgcaagagctgggccttgagcctgttctgtggccaaaaccagttaaaatagtcacattgcctttcactgcagaagctaaagaagtttctgttgctcttcattgagtgagagggaagcttcatttcttccattttattcttgataaaaaccgaagcacacagtattttaaggaagttattgagtgggatccagtgagtcaggatccagttgtctaactgaaatccttccattttcagccagttataccccctcagaaaggagttagtttatctgccagtattgttttagaaagaattatatgaatttagagtaaaaaacaaaagctttgatgaggatccactgtttaattttaaaagacctaagtagtcccaagaatatgtgtgtgtgtttgtgtgtgtgtgtgtatgtatgtgtgtgggcagatggtgaagggagaggacatcaagagtgcaaagtcacaatttctaaactttgtgttttttttttttttgagacagaatctggctctgtcgcccagactggagtacagtggcgcaattttggctcactgcaacctccgcctcccgggttaaagcaattctcctgggattacaggcgcccgagaccatgcctggctaatttttgtatttttggtggagacagggtttcaccatgttggccaggctggtctcaaactcctgacctcaggtgatctacccgctctggcctcccaaagtgctggaattacaggtgtgagccaccgcgcccggcctccaaacacttttttctgtataaaaatgtgctgtgtgcagttgacattgttgaccttcactttgttcctggggcttaccctaagagtgaggatgtctttttcatatatgacttttacattttaaaaacgtaatggaattgtagattttaaataatcggtgttctggactgtgtgacatagaacatgtcatttcactaagccgtggttttcctttcagtaaaatgaacgggtgagttagggtctgtgattttcaaaatcttatcagtgagtagattgcctctgttttcagacaattgtgtgtggatcaccaattttaaatacagtatcccttcacccctaccacatcacacacattcatacacgtgtacacatatacacatgcactctgaaagcagagagcactaaaactcctgtggtttgagtggaggactgggatccttgtcaccctccacaaggctttcccagggatccagccctcacctgggtcctggctactcacaggctcaggccagcattattagtaccatcaaggagcttgttagacatatgcccttatgacctgccccagacctactgaatacaggctgtgtaggtggggcccaccaatctgtgtttcatcaggcactccaggtaataataagccacagtagcatttgagaactgctggccctttgagtgcgaagcaatttttaaccaagattttaaatggcaggggtgggaaagcagcgggtgggaggcattcagttggaacacttggtttaagttgaggcatgttccttgtactatctgtatcatgataaatatatactagtggtggaagagttccttttttgtgactaacatataggtagcagtttatgtgaactcttctagaagttatagtgccatatgggaaaaattgggacaaagtggcaagaattccaaatatagaagaaaacgaacatacagcatacttttggcatttgaactttggaattgttaacaatccaaagactcagttgcattttagatcacattccaccccatagactcacagtttctggttatgataacgaaagccagtgatgagggcattattcttgtgcgtttctctttcagagttcgcagattgctttctgactccagcagtgttccttattaccggttctttgtattctaattctttctcaggtggtctccctggcattttttctcttcctattcttatattttgtgatcattgctcagaaaccagaatcagactacagctctacttcccccaaagcagcaagaaagtgtgttcacaatagcagtgattattcataatgagaagtcatagtgcactaaggcttgggatggcattttttccctctaggggtctgagattgtgaatatttttgggtccttggagtctgtccttttgctgaatggcttggactctgggagggcatggcagcgtccacctgtgcagggccgacagtggtttcctttgtctggaatgacgtacttaatgttaataaggtctggaatgttgggagtcaagacagattttcttttggactctcttttggtcttggctccctgtagcagataatgcttgtgcttttctgttttctgattaaaataggatatttagtagggcttttgcacttcacaagtggcagatttcctctttctcttgtaagctttttctgtcttgtgagcacatatcctaggcatgctcagacgaggtgttttggaaggctggagtttggcagggctcttcttttcccccagagtatctgtttcccttactgcgtttgaacactgtactgtttctagatacatttttaatgttgctttatctctcaagtctgtaggtgacgatgcatcctgtgtgttttcacctgtctacagctgcatataaattctcagtattgcaaaaatatcaagaaaacatgagaaaagttaaaagtgagctcaggtcagtggaattcatccatctgactgtcaattacagtctgaaaagtgaaaatagtccaaacaagcccaaataacttttattttttaaaaggacagtggggacccctggatcagaatgcaagagacgtgagacattctttttggcaggaaactggacaattaacatcgccacttccatttcaaatgtaggctgccagatccgtccgctcagtttagaggtctctgagtgactctaattagggaccaagcagacttgaatgccttgcaactgtctatgtgtgggatggagatagttttggggtcagaaggctgtttcataaggagcatgctgctcattaacatgtgctttctgacttgggcgttatcctgcagggccaaggctggagaaatcaaactatgaataattatttttctctaagacccttgtatgatgattttttcccccttactgggatgttgattttactagtgcaaaggcaaatttacagctcaacaaagaggacaccatggtggcccaaattgttaattagtagagtatataattgtctttattaagttacatcacttaccctatcttttgcctttcgccctttccccctcgtatttttgtcgcaatctggaatgttttaaagatgttaatgcgtgattctttcaacaggcaaaatgagatatttttgtcatgtcaggttaagaagtcttaacccattaaatcatacttgaagcttcacatttttcacttgcatataaaaagacaaacagcatgcaaaaataattcgctgagttttcttttgaaatgaatgttcaccagaagtttgaggtcagaattttgattagtttttaccatatgtagtactgaactctgtaaacccgtgttattttctctgcctttttgctttcttggaaactgatcatggcagcatttagatgacatcagaacccatgttggtaaaataaatgtcatcccaaagaaccctttaaacagcaggtataagtgatgatatggtttgtttctggtatatttgtaaccttcagttttattgaattgaaacttctatatgttatttctctcatttagctaagttgaattctgaatttaactgggttagaggtcatcatcacaaaagtgccatacgcagaagtaaaatatgtactagttgggaccttgcagatcttggtttagtctcagttcagccacctgggaactatgtgaccttgggcatgatagttaatctttcaaggcttcattttcttcttgtgtgtagaaaataggggtaattaatggcatctctttcagaggactatcatcagctcttagtacaatttcagacactaagtgctttaaaaatgtagtggtattggtaaagaaagaccatgagattttttccttgtgagaactgctttctgtgggtcactttagcagaacctcagcctgtgagcatgcccatcagaatgctgttgggcaaggcatcctgcagcctgggtcagtgttaagtaatagtgaatgccaaggacttgagataggggagagttcagaggggcatccactccctaaaaaaggttctcggactattgccaacccacaaacaacctgctgaattctgggcaagaataaaatgcagtcctctctccgtgctttttccctgtcacctctctgggttgaattctctgtgtgagcccacggaatggggtctgacaggcccgcttgattctgtttgaacccactcagcaaattaaccactctaagttactttgctaaaaggaggagattgcaggggacattagctggaggcgatgggcaaacaacaactgctctgtatttatttttctcccacccacattccttgctttagggcaattagttaagctagatggataagctaactgggtaacccactaaatttccaagtctttcacaacttttccttacaccttgcaacttgtacaccatctcttccgcattctgtgggctgcatagacctgccctgctacattgcggaaggggtcggcactaggtgtaggtagatcatgggggtggcgagacatcttggaggctgactaccaggtgtcgacgcagaaaccgtttctgttaataccttatctgaaagagtctcagcatttgtgatggaattttggcaaatttcctgctgctatgtcaacatcgattttgtcattgcttctccttctgtggaatggagccctaggatctttacataaactgcagtgtgaagaggcagggttttgaacttctggttttgtatcatcattattgtaatgtgataattatagtctatattgcaaatacgttcattatcattcatgctttctgccatggtcagctttggcttttattttaaatttaatttcctcaaccagacacacagtgtagcagactctattaccctatttcagtttttggtgctgtaatgagactttgaaattctaggaactgagtagataacacaagtgtgatgtgggaaaggtccctgggaaacaacagtgatactattaggttggtgcacaaataattgtggtgtttgccatcactattgcacccacataacagctcagtgcatgcaatttacaaagtaatgagtgaaatgctccctatagttgactataagatttcctcatttttctctggtgctgaatttgcttttcaaaaaactcttccccttgctgttcccttccccattccagattgtaactgcttctttccagctgcatcagaagaaggggactttccgtgtaggtgttatgctcagaaaagggcagaaaagaccaggtcatggtggggatgacttgctccaagcacaaaagagaattgtgatggttcaggaagactggaaaacaatgaggcaggaaagaaatgagaaggcttcaggggaatggcacattgaaataaaaggaaatggtaagagcaggaaaacaagtagaatgaaaggagcatacacagtgggcagggatgattggatagactgtggaataaaggtaatttggggaaaaaataggcagaaaataaaagaggtttcatggttccatggttgcatattccattcctcccactaggttaacatttcccagaggggttgggtggagagggggaaatcctttttgccctgttgtggtccatgtgcccttttgctggcagctccacttggaacaaatctccctgtgaatacatctcctacttttttcctatttggagtttcctgatgcttttgtcttcctcttgtgctggattagagcatccactgccagcatgcattaacgtgataaacaaattaaaagtgaagtcttaagtagaactttggaaggagtaccagtacactatattgaggtattggattttttgaatatgacttgaagttgttaaagtgatgttttagagttttgatgtgcttaaaaactggaaattgagaattttttttaattttttgttttaagttaaaaattaagcacaagagaccaggtatgggaggatcactttgtgagaatcactttgggaagccaaggcaagaggattgcttgagcccaggagttcaagaccagcctggacaaaataacaagaccctatctcttcaaataaataaataaataaataaataaataaataagccggatgtggtgggcattcaggaagctgagatgggcgcattgtttgaagccaggaggtcaaaactacagtgagtgttgatcgtgctactgccctttagcctagatgacagagtgagaccctgactttaaaaaaaaaaaaaacacaagaaagtgggggaggggggcaccacttttcctttattcctgggttagtatgcctttgtcaaaagcagcttgctttaaatgaagatgtcatgcttatttcaagtcctcttacaaaccgaattcactctcatatccccttgatatgtaatgaaaagcaatatatatatagcatttctgtgaaataatcaagccttgctttctagacttattagaattacctcatgaaagcaacatgaggaagtgagtgggaagaactaggtctacaacaattaaaatagtttttgttttttttttcagaaatgcatttattactgcttctcttaattcacttggtgaacttccattgacctttttttccttttatttgaaaagacacaaattattatatggagcagtaagatctttcaaaccaggaggcatggagaaactgccatattttaggttcactaagttcctcaaaactatttaagtgtcttgccaagcacatttaaaaaaaattcgtatttagtctttcaggaagatttatcttttgttggaatgttgctccaaggaactctataagatatcagcatctcttgaaagctctgttaaaaatgatgtgttacttaagtgagaaatggttatgggtgctttaattattcagcgatcaaggttttttttttttttctttaaacacactgacagcattcatattatttactacttacactgtcatccacgtgaagatggctccaatttaattgcagacagttttcaatttgaaaactgtatcttcatttcattgaagaatttcgtgtctgggaagtactcttccctatagagtttaatctctgggtgtagtggtctcagcatcatctacaacattacacatgagggcaaaactgtttagagtaagttaggtaagttgctattgcattagcatttctcagaagaaagatgatcttttaggtagtaaacatacatgcatcgtagaatcagtaggatttcctgatttgcctgactctgcggtgcttccatgcctgttttctgcgttgtttctaaacttccttttctttttttgttggggggagacagggtcttgctctgttgcccaggctggagtgcagtggcaccatcacagctcactgcagcctcaacctccttggctcaaacaatcctcttgtctcagacttctgagtagctggaactacagctgtgtgccaccccacctggctaattatttttatttattttattttttgtagagacagggtctcactttgttgcccaggttggtctcgaactccttaggctcaagtgattctcccgcttcagcctaccaaagggctgagattacaggcgtgagccaccgcgcccagccctgcatcatttcttttaaataatgtcagggacagcaggttctatggccctgctacccatattggaatgagagatacagtaatcagctaaatcttagcctttatagttaagatttcagaacttggttttctgaactgaataatctgtgggatgtttgtacccacaaattaggattctcattcttctctttttcttctcttttatatttttatttcttgcagttttagattctatgaattttctacctctctctcctgttctgtatatctggcttccaagacttgccatatttatcgtcactaatactgtaaatggacttttaaaattcaacactttttattcattcatttactgctgaggtacttcttattttaggaacggggtaaggaaatagaaaatgataaagataaatgagaaggatgtttttaatactagattattgtggtagctgtcaacctatttacttttgaagaagaaagtttcaataattgctcttattttaagactatgttacaagctcattgagtgcatccaaggaaaaggaagcacttcagataagctaactgcacttctttaataagggtgtgtggtccagttgctagtttgtccttgtcatttccatttccttccttttgaccatttttatctttaatgatctcagtaggaggtaaacaacctcgataaggggataagggagaatgtatccaagtgctgcttgtcaatagctctgataaagatttggtgtgtctggaaaacctgaaacttaaaatgattctcagaaattatctctagggttcatttgtaatattgagtagattactatttctgtagatgggaaactactatttctatagatcaaaaatagtgaatatttgaaattttacatgcttcaacttaatattccacacatcaatatgaaggataattaataggtatctatacaaagtatatctctactgtgtttctcaactgttggtatgctagaatttgttctgtttttactttcagtgtcaacaagagtaaaaggtttagggagagaaaacagtgaacaccaaagaactcaggtaatttgtctactgctaggatgttttttgcaaatagatattaaaaatgatattttggggtgagcagtgaatcaataatctgtttaaggcaggaaatactagattttataaagatataaaggaataaaataagataagatcacagtgcccaagatgttttcttgaaatggtggctagagtcctattgattaatgttggtgactgagacatcaacattgaaaataaaccatccccagacaattgataattataggtgacaattatgttgttatactttatttaggcagtagttttgttcctggaaaattacttttattcaagaggaaaattagaagcgtttgagaactgaatgttttgtggaaactcttgtgtataatttttcagttttattcaatttcataaatcttcagggaatattttcaggcctagatttatggacactgtatatagtacctgctaccaaaagaacattctaccatcaggcttattagaaagcatattgtctgtttttctggtgccttgttttgagcagatgttccctcagcatttctgaactattttaatgcacaagatgggaagaacagtaagttaaaagacggagataggaattaattttttgactaggtaactgcatttgagtggggataaatgtcagtattctcaatctttttttttttttttttgagacagagtattgctctgtcgcccgggctggagtgcagtggctggatctcagctcactgcaagcaagctccgcctcctgagtttatgccattctcctgcctcagcctccccagtagctgggactacaggcgcccgccacctcgcccggctagttttttgtattttttagtagagacggggtttcaccgggttagccaggatggtctcgatctcctgaccttgtgatccgcccatctccgcctcccaaagtgctgggattacaggcttgagccaccgcgcccggccttctcaatcttttttatccctctgctcaatttgaggtaataccatgtggtcacttaatctgtcatcagaccctaaaaattcagtaacaagtctcagttctgtgttagcaggagaatggattaaaaataagtttgtaataaactctagcacagtcctgtcacttgagctcagttcctttgatttggcccaattttctgcactgtttttcttttcatattgtaatgactactgtccacagagaaggttaacacaatggaggcacacttctgatgggccctgtgttcctttcctgtgattaacaatcagcacacacaaagctggtgcttcttttttttcccctatagagatggggtctcaccatgttgcctaggctggcctctaactcctgggttcacggcactctgccacctcagttttccgagtaattgggactacaggcatacaccaccatgcctggcaaagccagtgatttaaaacaacagaaatttattctgtcacaattctggagagaatgtagagctcagaagtccaaaatcattgttacctgggtgaaatcaaggtattggtaggcccgagctccctccggaggctctaggaaaaaaatctgttccttgcctcttccagcctcaggtggatgctggtactcttttgcttgtagccacatcaccccagcttcaagatcagcatcttcaaatctctctgcttttttcttcacctcttgtttgtgttaagtcttcctctacctctgccttataagaatacatgtgatctcatttagggcccatctgggtaactcaggataatcggccatctcaaaatccttaacctaatcatatctccaaagacttttgcatgcaaggtaacattcacaaccaccacaggctccttccagcatccctgtctagaaacctggctgagccagcccatttgcctgcatcctagttaaggtctgattgaaacaccctcaacatttactatatgcttttcagtgagctgcagttaatttcatccaaatgtacaatagcagcagcaagtatctgtctctactaacacaggccaagaatcatttagcagagctaccacctgtctttagagaagcagtttacgtagggaaatctacacacacgccttttttttgagcagagtctgactctgtcacccagactagagtgcagtgatatgatcttggctcactgcagcctccatctccctggctcaagcaatcctcccacctcagcctcccgagtagctgggactatgggcgtgtgccaccctgcctggctaatttttgtattatttgtagagagagagtttcaccatgttgcccaggctggtcttgaactcctgagctcaaaggatcctcctgcctcagcttcccaaagtgctggaattaccggtgagaaccaccgtgcctagcctatgcacagtaaattaagctagtttaagcagttcataaagctgaatgctgtaacaactgggctgtaaatagaagtgagttgtgctctggatgtgtgtgtaaaatgtaaaatggtggctgtgtattttcagggcatatttaatagttaaatatcagaatctgtataattctttttaaatgatgaccggagctcatggcatttcccaagaagaagtgaaatgaacctatctgattttgaatatatattttctttaaaaagtaaataagatcgttttcacggagcatgagataagatttacaaaggtttaaaagtaatctttaatgaatcttatgtcctgtaaatgttaaataaacctcaagaaaattccataaagctggtacttgttggatattacactaaatagttaatgttataatagattgcaggtgtcttttctctgatgactgtcaggtaggtggagtctaataattgatttaattttgaagaagatttctgtgtaccctgaggtgtcgtatgctaaatgggcgataaattctaaagccctgttatctgctttgttgtgtttttaatagttattgcctgttgtaataaacttgtatcttagatttcttttttcacccgtcagtgggtgttttgcctaaattgaaaagacagaagattttaactacatatgaagtactattttaagtcattgaagatttttccctcctccagaattttttaatcttgtcatacttggtgggaaataatgtatacatcaaagtcaagcatacttaattgtatagttgaaacatcagtgcatcattaattgaatgaacaaattagttaaaactctgtatttgctgtgggtttcaaaaattacctgggcagtaattagagttacaaagagttgtaaaacaaaagttcatgagaataatgaagttgaactacaaagccctgattgtataaatagggcaagaagaaagaacaccaagacgcggggaaaaaagtgttttggccagacgcgagaacttagctggatcatgtggtatcagccaagataatatgtgatagagaatggcagatacaaataccatggcactctgtacatgggaatagagaaatcagagataaaaaatacaggtcatgtagatcacagctctccctgtagccaggctcaagttaaggtagtttagttatataatcaacttttatggtattgctaggaccttagtaaaggaggggcaaagctgaggggagatcacattatattacctcgctggaatagtttctccaatctttccatgcagttaaaaaattagatctgtctatgtcaaaccatttagttctacccatgctcatgagcctttggttttagctacttatgtgttttttccataaagatatcagtcacttgtggcatataccatgccctgccagttccttttggaatcactttaaatgagaaaaataaaggactttgggaaaatctatttcaatgtgtctgttaaattgttttactatttgagaatagttctggactctgaaatacattttccatttaatagtatttggcttttttttttttttttctgagccataacattcgtggaaatatgttgaaatcttaagtggagagaatatgacttactgcttttggtatgacttgctgtctagaatgttacagtcttcactacagtatgttctagtcagcagcattagaaacaaggataacttcagactacaaagaaatatgcatattgtgattcataactttcttcctgttttaaaatcctcattttttttctttcctttcattttccttcttctttcctttcctaggctctttctctgtcacccaggctgagatgcagtcgcatgatcatagcccactgcagcctcaaacactgcatctcaagcgatcctcctacctcagcctcctgaatagctaggaccacaggcatgtgccaccatggctggctaattaattttttttttttttgtaaagaaggtcttgctatgttgcccaggctggttttgacctcctggcctcaagtgatcctcttgccttggcctgccaatgtactgggattacacacatgagctaccgcccccagcctattctgaattcttcagattgtagagccaactatactacaaatctgtgcttttttttttttttttttttttgagacagggtcttgctctgttgcccaggctggagtgcagtggcgtgatctcggctcactgcagcctccaactcgggttcaagcaattctcctgcctcagcctcccgagtagctgggactacaggtgcgtgccaccatgcccagctaattttttttttttgtatttttagtagagacaaggtttcacagtgttagccaggatggtctcaatctcctgacctcgtgatccgcctgccttggcctcccaaagtgctgggattataggcatgagccaccacatggcctaaatctgtgctttcttataggacatttcatcaaatacatattctttgtcacttgagtggcaactcttcctggatattaatactgtttacaaaaagttaggtctagaaaatgacattgattattgtgagacaagtaacacatttctgtatatccaaaatatatttcattaaatttgactcttttcctaaatttccaatgttgttgtagtgctcgttttgtaatattgtgcttgtgtgtgcacatgtgcacttacatagaggttaaatgtgtaaaataagagtgttattctctttgctggtctcactgctttagctgttgttcccttacaattcgttctctgcacagcagctgggtgaagtttttgttaaaacccccatgttttcctttcaaacttagcatacagtgcaaactctaccgtggctgctgcctgatgctgcaacgcaccttcttccagccctgctccagttctctgtgcccttgccacacagcttactttctccagttctctaacatgtggggtctgtcctgccctagtgcctttgacctctctgttctctctcttggaaagttcttttatactttttatagtagaatccttcccatccttcctggcatagcccaaatgcttcaggatcagagagaccttcttagactacttcatcacatcacccttctttacatactcttcatgacacccaccacgagctgaccctattgtatttgtttgtatacatcgtctatattctcctgcaagagttcacccttgactgtattggaaacagattggagttggcagaagataacatgcagagctcactcaaggggacttccagacatcttttatagataatatgaattgctaaatttgcttttcatttaaaacatttcgttttataagacttgggttaaaatacagaattccattgcagttggaaagagttaccaaatagtttattatgcatgcttgaatgccagtattgcacagcatgtagtgcagtcagtatgaaacactttttttgaggaactgaaatgccgggtaagaattctatgctaagcctatttcagccccacaaatgaaggcctttcctataaatgcagtcttgtatttccttccggccagataaatgcaataaactgtcatcattgctctctccatttttgtttagtaagaatgagcctctttaggtgtttgcagagttattttggcagtctagtattatttccactatcattagcttttacccttaggtagaacctggactttgtgttttcacctatccaattttcattacatttcatgtaattcatagaaattaaagtttcactcagatactcttgactgcatagcaacaaacctattttggagtattaaaacaaggttttaatatagaaactgtttcagccttttgttttaaactattgatttcctacatagtttggagattttttttagataccagctctcttcagtagttctgattctcttaggacttttatagaaacatctgtaaaaaatggtataataacttttatattattcagcacctttttttttttattcggaatggtttgtgtgctcttattctgatgaaaaagaagatgaaaacattcttttctaattgttgggaaatgttgtggaacctgactttttgatcactttctgccagtgctagggcctgtttacctactcgttcccacttggctctgccagctggggctgccttaactggtttccatgctcctatgagggagttcttaggtaaacgtcaagtctgcgtcagaaataaacgtggagagccatctctttccaaatgttcagtgcaagacagagcaacaggttctgcttcgagaattattactggagacaccatccacgcatgcaagcattctgtaccaggtagtacactgacaatttggaacaaagatagacactgccatcttggttcagaaggcctcctaataatggcattctagaagagaaaacctggattatgtagcctaagatatggtcttgttctggtagaacacgtgtgaataggaaacgcatcgtagcccttgctgatactgtcactagggtctagatccccattgggcttaagcagagatgggtaattttggctttttcttaaaatatcccagcagtctgaactaaaaatacggagatattataaacctgtatttgcctgaaaacaagattgtcaccaatctcaaaagtcagaaagaaatcattctttctcatactctgtataatagctgtaagagggaggggaatggaaaggtattttggagtttaaaagtagtaaaacacagaaccatgaatcctgcttgcaactttaataaaatttgggtattttcttagtagaacaccttttctattcctgagttaggctacaaggactgcccattatgaaaccaagctagaaactaccttaaggttaaataccttaaggagaagtaactaacctttgcagcagtggggaacagtcacagctctgagaccccatctctggtcagtgaccagagatatctgagagctgatgggctgcagtggggagaaggactggctgctacaggaaataaaccttatttcagacccaactggaaatgatctcttatttaatatgttgggttttttttacatgtttttagggaatttttagattcacatttcaggagactattctgtatttgagcctttgggttttgctgaagagcatagaaccctaaaaacctaatgtgatcttagaacttccttaatttctttctttccactcttagtctcttttctcatttcctttcactgctctgaaaattaacacctgctagggaaatcaactttaggctgctttcattggtagccagtgtttaaaaatcaatcctggcaactaatgtaaaatgaaatttggaagacgtcttgattctcatggacttgtgcaagctgaagttattaaagaggattaggaaccacagctggtgagcagatggaatgcttataatttcacaatgttaggtagctgtaaactcaaatctgcacaaaacttctttgctttttctctagtttatttcactttattttcctggactgtaactctgggcaagtacgatcgtttaattgttggagatgatgagccttaataggttcctcatttagatggcatcatttaaattctggtcgtacaatttcatactcagaatttcattttagaaaccaactatttaataatggacttattaacggcacaataagtaggaaatggttttaccttttgttcaaaatgtagaaatgcattttaaatttgagcaatgaagactggttcacagtaattgcaactagacaatataactacttgtttcttaaagaaatgcttgactccatcagttccttcagctttttctgtgttcatttctactagaaattcctgtgtcatagaaaaaagtctcctaaagccaccttcttcaatggctctgctatctaatcacaggctgcgtgctcgctatgtattccctgcacccatgactacttctctgtttgttctgccttatcataatataggggccttatacatgcacagagcaactgtttgccctcttagaaacataagcctagaccatattttctgggctggtaggttagtgttttctccacaaaggaaagtgtttgtgagactttcatccagtgactgctaggaaggtcaaattaggaactttattctacaaatacaaagacattaacttatactttacgttagtggttgttgctttatttaagaatggaattagtgtccactctacagtttagcacctctttatcctcactgaaagtctttagagaaatggctgctaaggtggagtttcttcaaatacagaaaaacagctggagccgtaaataagttgagcagcctggatgcactctgtagtagctggttgggaagaaaacaacacacggatatttcaggtggtgccacacaacaaacagctgtactttatggtctgagatagtctctgttcttttggaactggtgtgtgctgcttttgcagtcagctgcaaaaaaatactatagtatgtcttttggaagcaattactgcatgattctcagtgttccagcttcaaaacatcctgagtgttccatttctatacgtgcgggagaagaggataaattaccaatgctttggcatgaagtaatctggagaattattatgggattggtttttcttgaccagcttttgaaatgactttcggtagcttctctttggatttccaaactgaccttctgtaattggatgtggcctcttacagaagcagtagtataaacatgtttaaacttcgaatgtaattattttgtcctgaaccaagtagtctagcagtctcttccagcggatagatttgtttatcttaagtaaagttaatctccctgccttacccttgttacctttgggcacaggagatggcaggagaagaggttttggatggcccccaagaagaaatagacttggaccaaaaatcagaagacctgaagatttgatactaggttcttttagattttcctgtgcgatcttgaccagattcatgaaatctctgatttgctgaatctatagtaaatgtgtataataatatctaatatgtatttgcatatgtttggtatatgtattgttatgcgatgactgacagaacaaagtagcacagactaggtagcttacacaacacaattttatcttctcacagctctagatgctagaagtcagactgcagtgttcacagggttggtccttcagggccatgagggaaggatctattctaggcctctctctatgacttgtagctggccattgtctccctctgtcttcacatcctcttccctgtgtgtgtgtctgtgtccgaatttcctcctcttctaaggacacctgtcatgttaaattagagcccaccctaatgagctcttattaacttaattacgtctttaaaggccctatctccaaatatagtcaaattatgaggcactagggggccaatccagatttttttggtcattcatttttttttcttttgtgttgtcttatctattatattttcctcttgtgcgtttttatttctcacccagtttagtccatgaccttaatggccgcttttgctcacaactgcccctcgggctcaataagctcactgttgtccagggtttatacacctcagctgttaggagatggagatcagatgaatatggtttatcatctgtagagtgaaatgtggctactaagtggtaccattacagagccaatttggggtgtaaatctagtatttcggctcttggactttttaaactgaatctttaaatagaacactagtttcattcggggggggggaatatacatgcaaaacacattaaggcctatgatgaatgtcatgttttgaacaacaaggacagctcatttggacaacggaaatccatctgcagggcttaagagaatcctttattttatacagaaactgaatatgttccaaatactataaatgttattaaaggcttagaatgagatagcaatagcgcatagctttggcctagagtaggtgggcttgaaaacaattcgacttcttttacattgaccctggatttgtggatgtctgttctatcataatatgttttagagaataaaatggaaaaataatattaagtattctaattttctaatttctaatttaagctctcttgtaataccagagagcttctattcctcagaatggtctcaattctggagaacagcctcttgcaagtagcattttccgtatagacatttcttgcctgctggcccaatcttaacttttcattttagttcatttctcagttcaatgcatttagaagacagtgcatttttcttttctggactagggcagatggtgctgtcacttttgattatctggtttttttttttttaaagggaaatgttgattaggaagagcaagaattgaaataccaccagattaaattgagagcagaaattatacaatccaaaaagaggcaaatctgttctatgtttttctgcttagtttactatagtttatgtttgactttctagatttcaagtttgatatattttaagagatcattttaagatagcttttgggttatgagtttgctttgtttctgctttctagaagatacggaagatagaaatgtttagatggttttctttttctagtcacatttaagtaagaagatcctcgggtaagagtagcttttagcaaatccaaaatgtttggataatttctgctttatgccactgaaatctctcacttgcagtctagtggcactttgtattttcttactgtttggcgatctaatcttaaattagaatacttaacaggtgttccaaaacagaagtcacaaggaagtggacaaaggggcccagaagacagcttgaagagcctcctgctggctacatttagggcaaatttagtgtccaaaaaataatgatggtggtgaagtgtagcagattttaacacattgagttaaaaaaaaaagaatctgggttcaagatactttaaaagtgggagagagaactaataaacatagaaggaatgacagaattagaaaaatcgccatctggaaactaccaatataatgatacatgctagagatcatcggtgtttactgtaaccatcagctgaaaggggagaacgtgttttgacaatggagacaggttttacacaataccttaagcaagtgaccaaactgagcatcacctaatagttcagacagaactgtgcatgttctcatgtcataggatgggaagtatacctgtaaacagttctttcccaaaattcttagcctgtatctaattatgaggaaatagcatcacactacagatagtgatatatattatataagaaaactggcctgacaactccaaaaatgtcgactttatgaagacaaagtataagggattactgttccagattaagaaagattagtaaaaacctgacaactaatgcatgcttggtcctcgattcgatcctgaattaggagaaaaaaaattaaagactttgttggaacagttgagaaaatttaaacatggattttaatttcaaatttattcgattaatgttaaatctgattgtagtaatgtgtttgtgtttatgtaggagaagctccctgttctcaggaaagaattgctgaagttttgagggtgaagtgtcttgagatcaataactttctttcaaatggttgtgaaaaaacgtgtgtgtgtatatatatataagtagagatcaaatgtgagcatgcaagtatagcaaaatgttaataagttgaccaatctatgtgtttttcttagctcaggctgctataactatgccataaattgggtggcttaagcaacaaacatttatctcttacagttctgaaggctgggaagtccaaatcagggtgccagcatatttggtgtctggtgaggtctgtcttgctgttttatatagatggcacgtttgtgctgtgtccttgtgtggctgagagaagaaagcgagctctctcagtacccttataaggacatcagtcccatttatgagggctttatcctcatgacctcatctcattctaattaccttctagtgccatcactttagcacatagggttttaagatacacgaattttgggagggcacaagcatttagtctctaacagtgttcatagtactgctccagcttttctatagattaaaaatgttttaaaaatgtatttttggccgggcgcggtggctcaagcctgtaatcccagcactttgggaggccgagacgggcggatcacaaggtcaggagatcgagagacgatcccggctaacacggtgaaaccccgtctctactaaaatatacaaaaaactagccaggcgaggtggcggtcgcctgtagttccagctactcgggaggctgagacaggagaatggcgtgaacccgggaggcggagcttgcagtgagctgagatccggccagtgcactccagcctgggcgacagagcaagactccgtctcaaaaaaaaaaaaaaatgtatttttacaaatcgagcaatttcacataaaactttgcatttctagattccctagaaaaatgggaatgtctgcctcagacccacgataccccaagaataactgattggctgcatggcagctgccccctcagatagggtgaggtttttccattttccatagtccttacccttcccttttgttttatatacccaccttctccactcattgatactacctgcctaatggcgataggcattttagtatgtacccacacatgtaactcttgctgattccttggggtggtggtaggttgtgtcatggatggtaatgacttttttgtatgctgaaactcttgagccctccggatttggtacccgtatcagctgatgagcttcacttggctccttggccacaggctgagtatctagccttattcccaaataattcagtcatctgagacataattaaggaagtgtagatgtaaacactgttcaaaacttgctggataggaggtatacatactaaaattatctttcagatgcaacatattagaaattgtactctggattccacctgtgagttggcacagtcttgcaaaaagtattgaataagttgcctgaaaaaaatttaatatggcatgccaagtcttaatgaaaaaacattttgtggaaacgtttgtagactcccatgcaaaaagtagtgtatgaactttaattacctttgttaagttgttctatcctgtatttaagcgactactttcctgttacatacccagggagggtaccagctcttgctggataatcatggtcttgagccttcacccagaatacaagagctgtatctggcagaggttagggctcagctagcagtgaacagttcaaacatacagggaagaagaggaaaggactggttctagagttaatctggccaagcaaacatatctacctcatacttcatctatttttgtgggtttgcatccctgtataatttgatgttctgaaaaacactagcagcttttggccgggtgtggtggctcacgcctgtaatcccagcactttgggaggccgagatgggtggatcacttgaggtcaggagtttgagactggactggccaacatggtcaaaccccgtctctactaagatacaaaaattagccaggcatagtggcacacacctgtaatcccagctactcagtgggctgaggcagaagaatcgcttgaacccgggagacggaggttgcagaaaaccgagatcgtgccactgcactctggcctgggcaacagagtgagactctgtctcaaaaacaaaacaaaacaaaacaaacactagcagcttttgtccagttccatgcatatacatgatttttacattgtgaaatgaacacaaagatttttcttagggaatctgacagaaatgaacacagaatcttactagtatttcagttcattaaagacctagacctggcactctgtgttgcccctcttattacccaaggtgttacatagcatttgcctgaaggagcccatttccctgtgagtgggttaatgcaaatgttcccggtaagacttgactcaaatcgtagtctcagggagggcaacgggggaatcatcctgtccaatgaattccagaaatagcaacaaaagctcagaggaaattagcccctgttgtcccattgacattctctggccatcgctcctgtccagctgggcacactgcttggaaaagaaattcatttgtgtttctctcctttctcttaaggttccagaacctgattggaacctaggccactcttgaaaatattttcctggaatggaaagcaactgcatacaacatacgtttacctgcctgctgctttcttttttggtgttgagagtctgatattcccttggctacctttcaggatttcaaacagagtaaccacttcacgggcaaaatggctagcaagatatttatctttgtatttttagcatcaggatgattgatatctcaagatatttctggaatatttgttttttgagattaaccgcattgtccttatattatgcaagtttattcttcgtcttgtgattttcgacatctttaatatttgtatttaaaaccactgtggatcgtagtcactacatggagagtcttagataattaattcttcttttgaatgcacttattgattccttttttttccccagcataagtaatatttcaaaattgaagatggccaatattctttttctgagtagaaaaccaattcaacacatattcattgttgctattgttgtttgtttggagacagagtctcactctgttgcacaggctggagtgcagtggcgccatctcagctcactgcaggcttcaactctcgggttccagtgatccttccacctcagcctcccaagtagctgggactacaggcatgtgccaccaagcccagctaatttttgtattttttgtagagatggggtcttactatgttgcctaggctggtcttgaacttctgggctcaagctttctgcccaccttggcctcccaaagtgctgggattacaggcatgagccaccacatccagccatcgacacacatgtttagtactgttttcttttgtccccattcatgcttatcagcattagtaggcattgactgggtatctagcttgtccttattattgagtagtcacatttctctttttcagctaaaattatttatttgtttcttttttgtttgtttttatattgattgtttactattggctttagacttcttacctccaaaatgaacatgatcagaagccacacattttccatgcccctagttcgttatacatgatttgttaaagagagtagctatgtcagctccttggcagatctgagaaagcatatgatgttatgacaggcatatctacaaatgagccttgtggataagaactagacagaagatttagagagaaataatgttgatgtcatcccattggaatgatagagctgttacaaccagaaatacattctatagctagtagctaagcgtgtagctgtatttcttttctaagaaggaaaaaatgtgaaataaaccaaagaagtaaattatgtatataaaggaggatattttaattagtttaggtcttaacagttattcaaacagtctgaacttgggtttctttttggagcaaacatgacaaccattatttatggaaagtttaaatttcacatgacacatcttccctctatgtgtgtgggtttctttctctctttttctttctttctttctctttctttctttctttctttctttctttctttctttctttctttctttctttctttctctctctctctctctctctctctctctttttcttttaaaaaaaaacatttactttgcttgtgtgttttcatttcaaccttccctttactaaaaaatgctttatttccttggtgtaggagatttgcttttagggaaaaggaaagacttgtgtctctaagctgagcccccctttccttttttagcatttccagatagactagttctcagctgactgtggacatgtttgaattagaggctcccatcttagctccttttcaaaaactttcctatcattaaatgtgcctatatctgcaaaacaaaatatcccttctcagtttgaaacactatccaagagtgccttattattattattattattaattaattaattaattaatatatattttgagacagagtctcactctgtcacccaggccggagtgcaatggtgcagtctcagctcactgcaacctctgcctcccgggttcaagcgattctcctgcctcagcctcctgagtagttgggattacaggtgtgcaccaccatgcccagctaatgccattcaactactaagaaggcagcaatgtagaaaatggttttcatgttcatccaccgcagctgtgatcaccagcaaggttgaatcaggtggaaaatggtttcgatctgtttatttagctgcttcagtgtgaggaataagaaatataaagtttgcttacacgatttgtgtctgagttcacttacttactgcacaccagaaggtgaaaagtagcccctgagaatgaagaataagaaacttgtcctctgaccttgcaccagaaccttgcgtttctgcatctggggcaatctcttgtttagttggcacacaccaaataccaaattcttaagaggggaagaaattaaaacaagacagagttttcagcttgaataaaaaagatatcctaaaggcaaatcagcagaattcttttttgttttgtttgcttatttttgtgaggagattagttattcttctttccttcacaatatgggaggtgtgtgtatgagagagacaagagaaaaagaacaaaaaaggaaaaaaagaaagcatgccaccaaacaatggcttcatccaaactctgacatacagtcttcctacagctgggctctgaaactgttttatggaaacagtggtcattcagttgacttcgaggcacacttaaatcatgcttagggagagataggccaagggcttagttaactcacttatttaggtcgtagagttgtgaattttgacattttcatactacactgttagcttttgtacaagagtttattgtttatgtgggaagtaactgtcactttaaaacagattttatttttactcttgtttggtgcaaattgtgtgcccgggttttatttaccttttccttcttagtctgtggcagcacaaatggaaaagtgttaaataaatgtggtgtaagtgtatttttctctctttttacccatatttacaattagaagcttgaaagaagacagaattctatctggccttggtaccacgtttctcctaatatgaggagctagtgaccagacacgatagggcagtgattgcattgtcactaccttccctccccatgccctgccatttttattttttatcttctcagaatcctttgtttatttggccccattcaaggcccactttttaaattcttccttttctcatatacattccctgcagataggtggcctttgctctgttcatttgacaaccttttctaagttaaaagcaaacaagaaaaccaacataaaccttcccataggactgagcaggtctcctctgctgccttctctttctcccatctacctcaaggccaacaccccaccagtgtcaaccccgtgttttctttctcaatgtcctctccctcaggatccccagatctcttttaactcttcatgatacagtcaacagaaaggttctacttgctttgggaccatgtattagacttgcggccctggagaaatcacatctactctctgagcctcagtttcctcatttgttccttatcttccttcctcagtcaacaaagacacctacgaatggtgtgcccagcaccggagatgagaaccgtgatgagctaagtaggcataagttcctgtccaccactgtgaaatggagcagagagtgtccatcttgcaggggacattgtaaaaattagcaaggtggtgatgcatagaccaccatgtatgtaggtgctcaggaaatgtcagtttttgtgattataatgaaaggcaaacagacaaggcaagtcctgacctctctttggaagttgtttttatctttgaaggacctttcccttgtatttctggcttttacctgaaattcaatctttttgatttcggacagttttttttttttaattccttttaatctagcttctttctctaatttttctttttttctgttaaaagcatagccatttcttctgccatgtgtgtttgaaagcaaggtgggaggggctttccagtttgtgtgggacaaagcatcctgttttaactccgttcttttatagtgtatttctagtgcatagtcctgaggatgttttattttctgatccctttaattcttcccttctttctgtgttgacttggtgattgtccctcttctacacttttattactccaaggatagggtctgacttgttgcctttgtaagaaaatctaaatgccttcttcatagcaggaggaaacagttacctccttcaactggctgtttgaacatagctatgtgagtgtttgaaaccatagggtccttcaaattctagaataaccagaaattgagaacacgttgtctttaacaacggaaccagttcatttattgtgactatgtttatgttttgttttgattttttttttaaccgacagttaacttttgagatcatataatatttacagtttacttagcagaggcttccagaaaatgtgagggtatgtccacttttggtttatggacacaatttatatcttaacatgaatacatagttataaatgagcttatgacatttggtcttttgaatgtgggttttcttttaaaaggttgcagttttcaaaaacatcatattgccaccagcccatttgtttttctcaccagactaaaggtagcatgtcctactaaacagaacacaacaggaaaaaaaataaggaacaaatcctttttaagtttggagtggtgccaactacaagtttttggtatttttaatatagactttgttcatttatttagtcaggaagtgtctattgagcattgcacgtgtatgacctatgctgggtgctgcgggtaatggtgattgtgtcctagggcaggggtcactgaactatatagtctccctgtagcctgtttttgtatggcccacaaactaagaggttgttaacattttaatgcgttatgaaaaaaaacccaaaaaacagaatatgcaagagacctatatgtggcccacaaagtttaaaatatttatttgatcctttaggaaaaaatttgcctactctagaccctgtggtgtctctgacttcctcaatcttatgtttgttggtaagaaagaccagaaataagcgaacaaataagcaagataattcttttcagattttgataattgataaggaaataggatataagagtgacagaaatgaggctggggtcaggtgtagcagtttaggtgggattttttgaaaagataactttaagattagacctgaacaataaggacaaacaggtctgtgcagagctgggcgtattagcccatctctcactccttagatccacatcccccttcccctccaagtgcctgcttattatacacagggctcagctaaatgctggttcctggaaaaccatttcagatgccctcttttgggttatctttactatagcacccattacaaggcactgtaattgcctatttggtttcattctttccacctcccctccactagacttgaaatatcttgggggcagggacatatgtcttagtgatcatatccctctagcatttagctcatgaactaggttgaatggagtctgctataaactcaaaattagattccatcaagcccactgtgaaaatcaagaagatcctctaacaaattgcagattcttaagtttaagttctattacttgtctttttttgtacacatgcttcccacctcgtactctcttatccaagcactattctttcatttctaaaacctaattatgccccaccccaaaaacatgcccatttacctcatctgattaaaaggcaccatcatccatccagttgagcaagccaaaaactaggaattatccttggtgtgtcgcatttcctcactcttacccatcacatccagtccttcagcacccatacctcctcaactagtcctgtctcaccgtctttactctcagttctagcccaggccaggtctatcctatcctttgcctgggccactgcagcaatccctgactggtctttctgctcccttgcttaccttccttatattcattgttcacacagaagacaaacacatcttttcaagctcaaaagatcttatctttcccttttcttaaacaccccagtgactgcccatcaaatgtaaacattttaacttaagtaaacaagtaaaaacaagtaaataaacaagtaaaaatacaactcaaaaatttgagctcacagccccaaatggagtaaccattgtctcttcaaccacatcttactctcagtttccaggtaccttggtccctccacttgcccttcttaggacctattctctgttgcctgttagattattaaatgttaaaatggaaccctgtgttaatctcgttaacatcgtgaacacttaaaactatacagtggcaagtcagtgaaccacagtgaaactccattccccaaagacaccttcattcctgattttcctggtaacatttgtaatatcaaaaattcgtgataacaggcaacggatttaatgataactctagttaaaaggccttggggaaggaacttgacaaccttactgccttctaatggtattgtttttccttttttctttttcgcaatgcagaatatgagttggaagtaaagagggtgcaagacattctttcgggaatagagaaaccacaggtatgtcttctggatttctcagcataaatgacactttttaaagtatttcaaatgtgctttttttcccctccaccacacagtaggtaagcaaaagggctccttccctttgcagattactcatcaactatgaaatagtgttcagttcagttattaatggagcatgagacatagaacagcggccttctgtgtgtagtcataatccactgaaatgtctttatttaggtgttctgaatgcagttagatattctttccaaagattctttcttttttgtctctctctctttttagtctacagttttcttttggtagtttttttttttttaacctgtataaatgtagtaataataatttttgaaaacctcagtaatcccaagtatttttccaagtaaacttcaaaaagatatttaactattagctgtgaaaaataagtccagaacattgggtgcaatggcaggaaagaaaatggtcggagtggtgaggttttgattttgccaggtgctttgaaattcaagtgaaaaattcagaatgttgatccagcctttcatctcagattagagccagagttctttggagtattttctagctgaattggaaaaccttgattctgcatatgtttcaaatactgaggctttttaacagaagagtccaaacatgcttcagggtacatagttgagtttgacaacctgaaagctggaggtgtgttgaccaacaggcataataaggcacttgtagaggattggggtgttgctgtttgggggcggggtgcggggagtctgtacttactttggtgaggagcaggctgccactgggggtttttgagcaaagaacttatgtaatcagggctgcattttcagaatgatcgaacagttggcagatgagttggagtgagaagaagggagatgcagggaagagcagtgttagaatctactactgtagtcctggtgaaaggctatgggagtcagaattagggtggtaacatctgtgtggcaggcagcaggggatagatactagagctgttctagagatagaatacggcactataacctattagaattgatatcaaatgtcaaggataactgggctttcaggtttcaatgcctcctctcaagaattgcttcctctaagacgcctccctgattgctgtccatgcccatcaagtgggaggctctacccccagctttgctgtgccctccatggacttctgctattgtatttaatacattgtactgcatctacttgtttctgtgtctttcctggtaacctgtggtttctctagaacaggttcacatctttgtcctttttgtatcttcagtgccattcttggacatgctgagtttgtttcactgtcagggaatctggaacgatagatacagcgggcggtcacaaatgtctgggaggccgatgctgaggagcgcggaggaacaagatacaagacagggagatcacatgtgtagcaatgatacgtcacgttgtaggattcgatgatagctttgcagacagcgggtgcagtataagggagagagattggaaaaggcgtgagggcagaatcttggaaaaagcttatgtttatagtgtagtagagaagaaaactctgcgaggaaaacagaggaatcataatcagagagagggcagagcaacgggttcactcatggtcccaaatgtagtttcggaacgtcatagtcacttcttagttatgtttatgcacatagtgctttctctcagatattcctagtcactgctgcgctgaagaagtgacacaatctctgtttcttgagggtgagatggctctagcaagataaagccatatttagattcattggtcctttttcttgatgcagtatttattaggcatttaatcttttgaggttttacggcaggttaataggcttttttaagtagctgtgttgtaaaatataatagggtagaagcgtcatctgagaacttttgttggtatcatttggaagcaaggattgcttggctacagaagcacgtagatgttagctctacccatgacagcctgaccaggctgttctgcacccatcatagagaattggcttctcagagcctactgcctttaggcccttgaatcaggtagatgactccccttgttttcatttggttctcacttagtagccttttgagaatttgacttccttgttgccaacagagagaaagtatgtgaggcaggttgacagtgctgtctaatctaccagatacttctgtttctcattatgaatcaattaactggcaatctgattgtatatatctgattccataagtcttatagtttgacattcaagtctgactctggaatcagggctgcattttcagaatgatcaaacagttggcagatgagttggagtgagaagaagggagacgcagggaagagcagtgttagaatctactactgtagtcctggtgaaaggctatgggagtcagaattaggtggtaatatctgtgtggcaggaagcaggggacagatactagagccgttctagagatagaatatggcactataacctattagaattgatatcaaatgtcaaggataactgggctagattgtctgagtcactgggcaggggcccggacctggcgaattcactcaggtaaatgccacaaggtaacagcctgtctgcagagccagccagcttacctggactccattctgtctcgttaccctcctccaaacctttgaagtggcttctgggtgagaaattcagtcaaaagataacatttccatatcagcatggcttagatgggcacagacatagtcaatacagctgaagagtctccttagtcctgtaaagctggagttgttaattctgcagcataagcagcacattatctttctaggtttggaaaaggcgggttgagaaactttctggaggtgaatagaaacaaagcctcaggtagttacacactccagagtcattaaagatctgtagatcagcatttatatctcatgcccttttaacagtgaggcttgaacttgccaaaatactacaccctaccttttaagcagttggatgaaaatcacctgataggaagtgggcgtctctggacacagttgctttgccagcatgtgggtggtggttggtgctaaccaccctgcatgtctgattctctggatggcagtgtaaatatatccgggttacctgggctgaaggcatagcagacaaggggagtttgtatgaagagtgccatgcttgttcgtgcctcctgcttttgcacatgactaaaacaacttctctttctctccacctgtatgtttcctattgctgctgtaatgatttaccacaaattgaatgacttaaaacagtacaaatttattgtcataaaggtttagagaccagaaagtccaaaatgtctctggctaggatataatcaaagtgttggcagagctgtattctagaggctttgggacataatctgttttcttgccttttcccctcttggctctgtctgcaaagtcagcaaccatattcccccagcttctacttcccttatcacatgcctgtctccaactgtcttgactccttctttcacttataaggacccctgtgattatactgggcccatccagataatccaggttaagtctccccttcacaagagccttaacttagtcacatcttcaaagtcccttttgccatataaggtaatatattcatgggttccaaggactaggatgtggacctctttggggacctaccacactcccctcctgatcctcagaagcgttcttgcctgagacagtccactgtttcttcccaacccagttagttgtttatgcagtttctctctctcctcttcgtacgccttttcttctgaagtttttgtttgtgattgtgtgttatttaactttttgctccgaatacctagcactgttcttgacacatagtgaacccttaacagatgtttgccgaataactgtgtgactgtagctgggttctggcaggtgggacaaacgcctgaagcctggccagcctcaggatgcgcctccgccagtgtataaggcagcagccactagagggaaggcctgtgctttgcaatctggcactctgggttgggacttgcattggctattacctgtctttgtgaccttgggtaagttacgtagtttccttgtgcctcagtttcctcatctttgaaaggtaggataagaaatactacctatagcgactatctgagaagtcaattatgtacttagaatgcagtatttatagtctgtagcatatcgctaagcaaaagtgaaacttctgtgctctgacatgggaaggagaggtatcgggccatctgacagggaaagaagcagagccatggaaagttgggcacacagttgtaaaaaggattatttaattttttgttcctttcagccacaactggtagcacctctaaataaaaggcatatattttgctttgaggttttgcagatgattttatttaggtgcggaacaatacgtagtacttgtggattccagttatctttctagaactttgggcaccctgaattgagcaagcctccactgtgacagagcaataagccaggtattattctgagtggcttaggaattggccagccatctcaagcctaatgtggtctgaccttctctggtggtggtgctcccatagactggtgggctgtttattttcaggatataaataatgtaacctggaattgcggttctgcattgtttctatccgcgaatgtttagcttgttgaaacaattgatttgtcggttccagaagcgagtaaactgacgtgtgaggaacacttcccctgtaagaagcagtcccttgaaagataaacagtagtgcacctgggagcacataggcggctcttagcacttaaggaatcataaaaacagatgactgtgaaattcttagatttgagtatcctttttctttaaccttttcctttttcatttattttcctttgtggtggtgtttctcatgatgatactttagaagtgaagccagtatttgtgtggtaatatttccttagtgtactctttaattagatcagtaggcctcccacatagttaaatccaaaggccagagcaaatttagaagctatcaatgtacaaggaaatatttttgaacgtaaaagaaacaatttagtagctgcgagaataaatggtgtttctgatccaagtactatcatttgcataataataaaatctcagaaaaaaatagaaaattttacagaatagtattaaaatactgggatgaacaggagagaaggtgcaaggagaaaggaagctatggattacatatcgaatagctacaggacaatgcagttttataatttccttatatacacatatacagaacaactgctttcaagttggagtctacatttaataaacagacaagaatgatttctaatcattagaaatggtcacatcagtatgtgaccatttagaagtaggaagtaattttatgagtgcttcaaggtgctaaaaagcagtttagtttaaataattcatatgcagacttacactaataacctatacaacagacccttttatagcagttattgaactgctttcaaattggaatctacatttaataaatagacaagaatgatttctaatcagtatgtgaccacttagtagtaggaagtaatttcatgagtccttcaaggtgctcaaaagcagtttagtttcaataattcatatgcagatgtatactagtaacctatacaacagacccctttatattactattgcagaaacaaatgtcagattgcaccttgtccaatagttttataactagaagttaccacgtttatcaccatcaaaggagactgactttctagttatggtaggttaattaaatatcaggaagtcagttagctttatggcttctaaacttttttgaggggtgaggagaacaacagctatgatgatcactgtgatgatcagattagccatgccctagttaagcttggtggtcactgctggcaagaaagtttcagcacacacagacttgcaatgtgaaggtcgtatatgagtgttgttgctctgaaataggcatgaacccagatagagttcctagagttccaaatctctcattaaagcattacttcccaggacacttggagtaaatatgtctagtgctgagaattcaccttcaagtaacattctcttgaaagacagcatgtcagtttctggaaacagccttaagtggaaacaagttccaagtcctaatggagaccaagtgatctttttctcctgattccattgcctaaacaagggcaccctcagtccaagagtcaatgaaagagagagagcaggaggacaagagggatttggccccagaacatcatcatgatctgggtgtctggctgcttagctcaaggaaagaattcacagaaaccactatcttttgagagtgatgctgagttgtcaaactgcatttctgataggctagcatattggaaaaatgtatttccacaaacatctgcattgcatgccgatgacagtgtacatcctgaaggcttgcttaggcactctaaggaaaaagtgaatgttattttagttgatgattcaagtgttgtatttctctgttcaggtaaataataatttaaccaagttctaagggaaaaaagtaaagttgtcatagctgacataaaaggtagagtttaaaaggatgtgactttatggatatttgtttggtatctagaatgttggcattcgactgagctattttgagacatggtgttacttcacaccaccattcatagaatcagtgctactgtcttctgtgttcttgggtgcaaagcagccacttaccaccttggctgagtgttttctggtaccttatgagcctctttttttcccaagaaactaaactctttgtaacaaattatctcccacattaaaaatcaaatataacaccaaatacctcaggattactcattaatgatatgtgaagaaattgagcagatatactgttgtatgttagaaatgctgtcttaaaatctaggtagagaaacaacatacaaataaccaagtaatgctctaatgtaacatgcaccaaatgcagggacggaaaatacggcaaaagtacaaagaagagtgattgaatctgacagtgcagacagtacagaaatctgtccagaatcagtctcaggaaacctaagagtccctctgtgttcagtatatctaccgtgagtcccctcaggtacctgtccgtcttcaacaggttggggttccttgaggccaaagatcataccttcatcatctttgtgtccacacagcccctcacagggtgaagtatgaccattaaatgaataaacaaggcatttgaactgggtccaagagaagttggttaaagccaagaaagtaggagagttaaaagctaagtcacaggggcatgagagagggcataagagaggccagcatcctggaggggcggtaacagcattgtggtgcaggtggattggaggggtggagaagagagctgctagtctggagccatagcaatcttcctcagatgttttccagagatgtgtaatacaagcctaccatcttctgtgttgcctatggcagaaacttagaccatcttatttccttttatttttttattcaacaaacatttactaaccaaccgctgatcacagttgaatatgacttggattctgtccttagggagtctcaaagcccaagggaggtagacaaaggccataacatgattagcaattctagcaatatccacaaggttctgtagaacacggaggagtgacgctgcatgagataatttagagaaggctactgggaggtggtgaggctgggctggggtctttaaggatgagcaggagtttgactaagtaattggctaaatatatcatgatattctatttatatggaataaacagtgtgaagtgatctccactaaaaatgtagtgaaggacggactgaagagagactctatcttcattttccatatttattatttgtatttcaagtatttaataattctaataatctttatatagatcagatgtgacaaaaatggaagaagggaaaaaaaagggactgaacagtttacctgtctccatctacagcctaataatctacagctataaagtctttgtgaacgttaaggtttagcatctgtattaagtcctgtttgtttttaatatgctatccagaccaatatccagatagcaatagaatagcctttagaaagttacagcattaaagttttgttcttagatttattttaaataattagatcatattttaagttgagtttctccagaaaaggactctaaaaaaaggtttgagtgcaaatagtttctgtggggatatggcccaggaagtcctggttggagacaagggaactgagacagagaagggaagtgtattagtctgttctcgcattgctataaagaactacctgacattgggtaatttataaagaaaagaggtttaattgactcatgcttctgcaggatgtacaggaagcatggctgggaaggcctcaggaaacttataatcatagtggaagaaaaggggaagcaggcatgtcttacgttgcctgagaaggaggaagagagagagaagggagaagtgccacacacttttaaacaaccagatcttgtgagaactcacgtcaagagaacagcaagggggaagtctgccgcaatgatccagtcacctgccaccaggccctcctccaagactagggtttatagtttgacctgagatatgggtgggaacacaaatccaaaccatatcaggaaggaagcccatgcagggtctatcaataaacaggttatagctgtggtcagccagagcttagtcctcataaacacctctgaaagatagagtagattttgtaaaacatgcttcacaatagtattttaagaaggttctgggtattttaagtctcagagtcttcggttcaactgaagtctgaagcagaggctaaaccaaaagtataaaaacagagcttagaatggtgaagcatttccacttctataatgatattaatcccatatcagcctggtccttggttccagttctccacccattgggttgtcctgggaatttgcaggacttcaagggatattattggaaaggtattagctttgaagaatgatttgacaccatgcaaggcttgaaaccagatccgagtacctgtgggtatggcttcttccacataacgtagaaaccttccattcaggtttttacttatgttaaaaaaaaattccctcacatgacattattttactttatggaggacagaatgcaaattgcactggatttggatgaaggttggcattgcaagaaccatattttggacaccaggactttgaaagagagcgccatataagacgtctttcaatataattaaactagtttactttggattaactttgagccagttttatgccactaccaataattctgaaaatgtaaaatggatttgaatacttgtgtcgcacgtttctcttccgcaggtttctaatattcaggcgagagcagttgtgttgtcctgggctccccctgtcggactttcctgtggaccccacagtggtctttccttcccctacagttatgaggttgccttatcagacaaaggacgagatggaaaatacaagataatttacaggttgtgtatgtttctattgtttttctttgctgctaaactataaaattggagttgtgaaggaaaatggaaaacaaaggaaaactttacaggcttggtaaattttcctttagtttattttaagatttagtaataattataatgctaagaaatcattgtgtccagagtaattcttatttggaaatgagtagcatagagctattaggtatgggtaaaatacatcacttggttatatttgctgtcagtagagtattaaagaaaactttctgttaatgtctgttggcaaaaggcgattatgacttttagtttttctatacattgagtgattataaggtgacttctctattttcagatgcagacctttttgtagccctgttttttaaagttctgcaatatgtttccttctgttttaccctatttcttaccttccacaatagtttccagcctgtaataaagatacttcaaaacatttcatttcgaggccttaaatggtcaaaagtttagctcacagagaagggattagccccttctgctctgtggactcccaggtattgaccattgaaaagattgataactgtgttctaaatgtgagaacaattttagggccatgtctttcttctttgtaattactgggcactactcagatttgcagagcaggaaatgagaaagtcagttttgttttaactgcttgtttggcctccctgtgagaggaccctcctgtgactgcccatgcccagggtaataatgtggtcacacaatcctcactttttctgccagagatgtttgtattctctcctatttccctactgcatcagtgccgcagagccgtatcttcccctttcctgttcctaattcttgctccacagtcttcctgacgagcaaagagggacagaggttaaggacgcaagccctgtggctgctgtgtcctcctcttgctaccgaggctacctccactgtcttccctggatgccctcaggagtctcttgagggtcttccaccccctactcttgctcttctacaaccttgccaactcactgcagaaacaaaatcaggccagatcactgcccttctgataacactccagggattccccactgtatttaggatattcctaactctggctcaccaccattttattctagcctgaaaaatcagaattagtatcaactttaaagaaatacagagtgccgccaggcgtagtggctcacgcctgtaatcccagcactttgggaggctgaggtgggtggatcatgaggtcaagagatggagaccatcctggctaacacggcgaaaccccgtctctactaaaaatacaaaaaattagccgggcatggtggcgggcacctgtagtcccagctaggagggaggctgaggcaggagaatggcgtgaacccgggaggcggaggttgcagtgagctgagatcgcgccactgcactccagcctgggtgaaagagactccctctcaaaaaaaaaaaaaaaaaaagaaatacagagtgccatctcccccatgcctggcaaggagcagatatagttgacccttgaacaacacaggtctcaactgcacggattcttgtcaaccacatgcagaccagaacaatattcacaggatgtgagacctgtggatatgcagggtcaactggggactcgagtatgtgtatacgctgtgtgggggtggggtcgtggtactgatttccttgtatgtactgagggacaactgtggatagagccttttcatgcaagatgaacattggtggcagaagctagagcctcaaatgcccagagaggttcggccggtaacatacgtaagcaagtggaaaggctgaaaatgaggtgaacaggagagctcctgttgccatcgaaaaacagtcgccactcagccttaagtcgattgttgctaaaatttgctgattctttgaatttttttttcaaaagatgctgaaaatctgaattattgtacaaatttccctgttactaaactaatggagcaaatgcaagatcttttaaaagatacaatgtaggctaaacaacagagcttcaggcaaggtctggatacaacttccagttcacaacttaaaaaaacccagccttttatttggaataatttcaaacttaaaagatgtcccaaaaatagagaaatcaaggaatacatgtatactccatacccacattcagttgttattaactttatactctgttttatcatttgacctccttcctcttttcctctttctgtcctcaatccatatttttttcataagttttatatgtaatggtcccttactgcaaaatccttcaggatattttctataaataagattttttttttaaaagaaccacagtgtaattatcaacttcataaacttacattgatataatactttatctgttgtctatattccagctttgtcgcttggtccataaataatacctgttattctgaaaaattgagcagttttccaccccctcctgctcaggagctagtctagggtcagacagtgcctttagttgtcatgtctctttagccttctttaatttggaacacttccacggtatttctttcacttttatgacactgatatttttgaagaacacaaaataagtcacatgcccacacacctttcacctttttaaaaattttcaatgaaacattccttattttgtgttggttacttcctcatgatttaagttgaagttcagtggcaatttttgagtatataaatggttttattttatttaagagagctatttgttgggtgcattggtaagtgaggaagtgagattgtgatttttgttaaagacagtccagagttgagataattgaggttcctgccaaggtaagtatggaaagtgccttctgttaacagttggcgtgatcatttttattcattagtttgttcattcattcatttgcttacttagttacttttatgtatttacttgtaagaagtgataagatcttttagaattttattagtaagttaactatgccattttcaagatctaagatggcatcattaaaaggaacctgattttctagtcccaaacagataataatatcaaataagaaagtttatttctggtttatggtggaatctgacataatagttcatgaattattgtcagtacattactggacacccaaatcccaaatctcgtttgcttttgaaactggtattagcaactaatgaatgctttttctttacagtggagaagaattagaatgtaacctgaaagatcttagaccagcaacagattatcatgtgaggtgagttaggacataagagccaaactgtattggagaatccaggtggctaaagcaaaaacctgtgcccccttttaagtttttggtgaatgttgcttaccttgctgtaagtttcagtaccatggctcatgggccattcattgactctcaagaccatagtaactgggaagacacagaagtgcttctgtgaacagaaaattaggtgttaaacactgaaaatcattttaaaagtaattttacatggtcttctaagatctgttggactatggtttaacagtttctttctataaaacagttgaatttttttttttttttttttttaccttgggcatatcagtgtttcttatagaccatcatataaactgtatattcaaatgactaaagaagccctttccttattgcaagcacaccattaaaccttaaaagccagtagattttgaaaaaggcaagtaatacaagcatcagattatctctgacgagaatgaactcaatttggcaaaacagttaacccatgtggtatgatgtgtagcctgaaatctctactgtgatcttctggagtctctactgtgactactctggaaggtagggctagcttattttaggaagaaacccagccaaccacagatctgtaaggaggaaagtgttatctgaatttttagagagaccatctgattgtttaaagatccatccatccattcatttgccaataagcaggtctgaatatgacccataacacttaaaaaaatttttttaatctttattttatttaatatttaagttccccagaaagtagttttgtttaactggatgtacaacaacacactttcccttttttttcaattatatatgcatacgtaaagattgcagaataaaattgtaagcatgaaatatacatctgttggccgggtgcggtggctcacgtctgtaatcccagcactttgggaggccgaggcgggtagatcatgaagtcaggagatcaagaccatcctggctaacatgatgaaaccccgtctctactaaaaatacaagaaattagccgggcgtggttgcaggcgcctgtagtcccacctaggcaggaggctgaggcaggagaatgacgtgaacccgggaggtggagcttgcagtgagcagagattgcgccactgcactctgacctgggtgacagagcgagacttggtctcaaaaagaaagaaaagaaatatgcatctattattatactttccaaaggttaattcacatcattagtttctttgtgatttcagcatgaggttggaggcaaggtagtctagtaggaagagcatatgagaattatcaggaggcttgagtgcgagtctggttctgccgtgaactggctgtttcaactttggtcaagtcacatagaaggctctgccatgattttctcagttaaaaaaaggtagtaaagcaaggatgtgtgttgaggatgtaatatcttattaactgcatgagttcttaaaaataaggttaaagcaatgtatatcagagcaaattgttttgcattaaggcttaaagcgcacatctgcttagttatcatattgtttagatgaactctattgcaaccatctcctcctgtttaatcaaaactttggattttgagtcagttagcttctgcccaaacatattgaacttttcacacgctttgtacaagaagatctgtgtaatttgtgaagctaagatgataatagaaatggtttaaccattcttcaaaatggtcagtataacaacaaaccagaaaatgtaaaagtcatgtaaatgttatctattattcattgttaacgtatgtttctttctgctccgtgctttaacagtttattgttcctgtggttagtaaaggtttactttattaatttcctgctcattgatgagcttacaatatcctttttcagaaacttaaatgtcatgaagagccttccctttatttaccatcctgtctgttgttccatttatttattttttttaacacttattacaaagggtaaatttgagagcacttgctcatcagctgtttttcccaacaaaacctgtgaacatcttgacctcctgagcagatagaatagttaatgcattccccaaaaggaacaggatgggagtatgagggggttaccatctaggggccttgggtttagactttctcctgacacatttgggactccttgcatttgtcatttgacacacgtgtgacaccaaacacatacaacctagggtgccaccagctgttatttgttctacctctctgctttccaggaagataggaagttctctctccttggtgatggtcaattttcatatttttataacgtcctttctctcctaataaaaatgtctctagtccagatttagtcttcgtgcactgcctgatgcacagtccatgtagatcatacgttctttttccttttacagtcttttcttttttaagctagagaagaatcttaacacttgcaactcttacttagacgtaacttcctctgccttgaattgcttcggtgaggcagcatgatgcatagtggacatggcttgcaacttggagttaatgactctgtcatttactaagggtgtgtgcttaagcgagccattgaaacttctttggtcttgttttgtcatttataaaatgagaatgataataataccagcctcaggaaaataggatgagagcaaatatatgtgcaaagctattttagaccagtaaagtcatgtataagtactaccttttggttttcccaagcttgttgcagttttttcacgctctgaaaataaaaaggacttaatgatacaagttgaggctgtagtgagccctgattgcagctgctgcactccagcctgggcaacagcgagagaccttgtctctaaataagtaaataaataaattcattgccatttttgtttgtgcattaccaatttagaaagtgatggaagtctgtagagccagttttgaaaactgagatatttgttttagcagcacaaaacaaggtaaatttttttcttccaattcttaatattgcacattttaagagtgtaagatttctttcttaaatcatgtactgaagtctcacctagacttctgttcttatattccttgttactttttgttttgctacactgagtctatcttattcacattgattgcttgatatcttcatgtaatgctttttctcattttcaactccccccacccaccctcgcccccatattagtgttattgcatgagttcacccatcagacacacaaaccctctttttcaatagcagtctcagtcatgaagcccggtcatttaactgcctggtacttgccttcagttactaggccagaacagctcttgccaccaactcactgttactgggaatttatttattgagtggcatccattagacagtgctgtagctcacatgcctgtggctgcttcagttggcatctgtcatgccatttgagccagattccacatggaaaattatattccaagacatttcaggtttacaaaatgtttctccttttccacttttcctatgagtttttgtgtatgattcttacacatctgttcagtcactattcttttcttctcctaatctcctagtggtgattgaggaagataatacccctctctgatgcacacattgattagcaaaatttagggagacctttattaaaggatctttattaaaatcactttcatatttgttaccctattcttaacacaaataattgttttggtttagtgttcatacaatatttcaaaagaatccatttgtaatcgtcaaggttattcagtgcttctttaaagggcattgtgttatgtattgtataaagccactaatagaaaatctcctgtctctgtgtgtgtatgagagagagagagagagagagagagcatgagagagagagacagagacagagatgagagattgtgtggagaaatgagaaaaatccaaaatgtaaataaattacattatattttaaatacttatatataaatatgtaatttcacaaacatgaacatttatacatacatacacttatttatacaaataaatatttatacatacacaaatgtatgctgtatatgcatttgccagaaaaatatatttgtcttttaattggtagttctataattaataatgacattacaatgaccattttactgtggtagtcaacagtttatatttttatcagtgataggataatcaggaatttgagtgaaggaatggatagcaatttcatgaaaattttgaagcagttttctagtcatcctccttaacaatttggcaaacaagttgcccagagatgatatcatataatgacatttcccagaaaaattgtgcagtgaaacatttccaaaaatatggttgacaagcacagtgaaggattataaaatacatgttattgaccagaaattgtggctcctagtatgttacatcgtgctagaaaaagttggaggcatatttctgaaattcttggagcacctgtttcctaagcatttcgccaggatttaagctgaaacaaatatgaaaacaagattaattatattgttagaaaaatgttttcttttcttgagataaatgcaacaaaaactgaactgtttgctgacgtatttaatccaagaaactgactgtattctacagattgtcctttcacatgatgatatttatggaaaactcattgccattatgtgaaaaaaatatattgcagtattctttaaaatgtagcatcattagcagagatttttcttttctatagaagttattggcaaaaatgttgctagtcactattacagtaagttactgtccctttactgaactataattgacagatgtaatcaagggatacttaagtatggtgccaactttcgtactatatgcagcatacttatattgccatacaaaatagatcttttttcctttgctgacaaaatattatgtgtgaaaagcattgaccccttaccataatattgtttaagattaaaggcaagaaaaataactaactccttctggcccatacaactatctgttttcaactacctcaaatttctaacctgcatcaggttcttttacttttatccccactgtcatcctcccagcctggccaccaggagtctccatcactcatgactccccagcctaggaggtatggattgctgactccaagaatcccaaagaacttgactaagaccaaatttacctctccccagacaactgactgcattctgctagtactttgcaggctgtttccctgcttccctccctctgctctattttctagatggatttttggtggcagctgtttttgtgaatatctaggacctgacctgcctgggtataactctgcatttgtaggcaaatgcccagtcattgcaaactgacatacttactgggtggaggcagagtacctaaacagctaaagtgggttgggtaagggtcagctgaaaaacagtgtcagtgctgaggagacagtaggaatggtggggactctagcaaacttttcagcacctgctccatctaaagcagggagctgcccacagatttagctcattactacagtgcaggaaagagggccgagtgagaccaggcgcagtggcttacgcctgtaatcccagcacttcgggaggccgaggcgggtggattgcctgaggtcagtagttcaagaccagcctggccaatgtggtgaaaccccatctctacaaaaatacaaaaattagttgggcatgatggcaggtgcctgtaatcccagctacttgggagacctggaggcggaggttgcagtgagctgagatcatgccattgcaccccagcctgggtgacagagcaagactccatctcaaaaaaaaaaaaaaaaaaaaaaaaaagggccaagtgttgctaaaacctctagtttttaagggaagccagaagtttggttttaaaaatgagagagctccagatagttttcagtgaaggcttaattcttacttttttatttcagaaaatgttagatataatcagaagtagataatagttgaatgaactctcatctctcaacttcttatcacctcagtgtcctcacttacccctcccctgccctgatgattttgaagtaaggttcagacaccatattatttcacctataaattatattaccatcatcacacacaccggaaatgtcttcacaatccagggactatttccatttcctcagttctaagaatgaaaattttgtttctttagtttgttgtaattggaattcaaacgtgtgaatatgtggtttggttgatatgtcttaaattttattttaatccattcatttttccctttatcttttgctctttcttgcaacttatttgttagattaattggtttgtcctgtagagtcttccacaagtatgaatttggctgattgcatccgtgttatgttgcttaatactgttctcctgtcctctatatttcctataaagcgatgaagaggtttaatcagatacaggttcagtttttctgccaagacagttttatagttagtgacatagtcctttattaggaatgcatagtgtctggttgtctctttttgtgatggtcattgcctgtaccccttaattcataagtggctctaacacttcaaaacatcatgtttttgcacactgccaccacacacacacacacacacacacacacacacacacacgtgtcttgggtcagatgcaatccatgagtcacctgttggagaattctgtgtatcaaagttcaggcttgagccctgcccatgtctggaacatgttgtgattcatttaaagtaacttactcccagtgagcccatcctgacacagggaaatgatcttgccagatctaccatttagttttatattatcacatgcttacttgcagtgtgtgcaaaagggaccatttccttcatcagaggttgggtggagaggatcctaatgataagaattatttgtttggatcaaatctcatgctgtcctcccatagggcaaatagatcaaatatgtaatatgcatgtatttgtatcttttgaggtagaaagtagacgtatctattggtgcctttgacgtgtatggcctctacgaatttttcatgatggactttgtggagaaatgactttgcaaatcacacacacaattgggacctatcttccataatgttgttatctttacctgttgtttgtgttcactgggtagagctaagggaagtggattgtggtgtttagagaaacaggattgcaggatgaacaaggggagtaggcaataccgtatactagttagacttccagggatgaataccatcgatccaaatttctagctgtgtggccttgggaaatttacttcatctctgtgtttccttctgtctgcagtgggtagtaagatttccctacctcagagagggtggctgtaagaattaagggctcaatatctatttgccaactctgtgaatagtttaatccttgcatctgttttaggcagcaaaggcttcgttgttgttgttgttgttgttgttgtgttgttgttgttgttgttgttgttgaagagtacatattcaattttgaaaaaataaattcccaatataaaaaatggaatataggaagttgataaaaatcaacatagccctattttatgctatttgaagagtgtggcattgtaatagcatgttccgtgctttttcttcatggcttctctggagaaatcaggcacatacgttgcagtgttgagccaaacatttcagtgtacggaacgaacatctttagtcttggcttcacgtataagagttaaatatttacatggattaaactgtacctgaacattgtttttgttgaattagagaaggttagcatacatgcttctgtgtgaaacatccatagttttacataaatgtgtacagtattaaatgtagttcaaagatggtatctaccctgtttgtacttctgtgctctctctccagtctgtggactcttattactgcttcttttgcctttttatccacctcttaactcttagcctttttccacataaagtcaaccagaaagtagtagctcattggtttttagaacgtgtatttggagatcgttctgggttttaaggtttattttcttatttagaataatctcttctagtcagtagatcctgcatattttgaaatggagatgggtggcacacactgagacaaatacctgttgggatgactgtcccctattaatgctaaccataggtcaggacaagaccaatagataagagcaagagcatggtactcactctaagaaattctgttcatctacagaaagccttagggtgaaacaaagataagaatcctggtcttctatgatgagtcactgccactgactgtgtccgttttgttttcagggtgtatgccatgtacaattccgtaaagggatcctgctccgagcccgttagcttcaccacccacagctgtgcacccgagtgtcccttcccgcctaagctggcacacaggagcaaaagttcactaaccctgcagtggaaggtgggtagctcaaagcatcaagaattgtctcactttaaaaattaccaggtatggtggcacgtgtttctagtcccagctacctgggaggctgagggtgggggatcgcttgaacccaggagtttcaaggctgcagtgagccatgatcacaccactgcgctccagcctgggcaacagagaaagagtctcgagttaatataatgtcagtctatagccatttgaaatattttttagcacgattccagttttgtgatatgttttctgcatagtaagtatgtgcaaccaattgttaaaaagttgtcgtttctgtaagagttgggcaaaggggtaggaggagggaactgcaaaatccagctttagctttttttttttttttttttttttgcagcagtattttctgaatgtcttagggtcataagcaatatgtataagtgatataggtacttaaaatacctacatcttatcactttctaatagtttagttcatttcaacaaacatttgaggactttagcaaaaagcttttatcaagaaagattcagagataaagtagttttatggcccttttggcttctttcagtggtgatactgaaatgtttaatatttaaaacaacctagaacatttagtgatctgaagtatgttagtacttcattaagttccactaattgggccatacatcggtcaggattactaattatctaagaaaaaaagactgaattatatattttcatgaaatacaattcactggctaaaaatagctcttaccaaagagagatcatattgccccttcctcaaggggcatcactggcttgttaatcatagttgtgtgtttgtaagaaaaccgtagattgttaccaatctctgtagcacttatttctctacatcaatattttagaatataatttaaaatgtaaaataaatggaggtaagagataaagatttatggtttgcggggagaatactaatgtgtgaaagaaagaaaatggctaggaagatccattattagtgaagaaatattttatcttttcatttctggcccggagagtcagtttgatctagggagctgatgaaagcaattcagagtcatggttagcagcaaagcatgggcctctgtggatccctctcaggtgggcagctgcattctcatagccagtggccagcattgagtgtgttacttggacaaaagcaaagtttaaactggcttagtgtctgaactattttattttccttcctggcttccagggataatccaggtcagtgattccccaccttttcagagttttaacacccaactggcatcatcatttaattccttggagtatacatatccatttaaaaaatgtgctctatatttacacatacatatgtaaatatatctttgtaaggaaagaattaaaatccattttgtttggaaaatataagaacttgtctttagattacctgagggaccccggggtcttataaacctaaagttgggaatcactgatgcatactctgcttaaaacctggatgaatttcaggtctcaggcagaccagcaacttcaagaaagaattttcttattaggaggaaaatgtttcacattttccttctccctttcctcaattgtaaatcagaaacatactcttgttacattcagtcatgtacaaacttgaaagttctggattcagttcagttttcgtttaaatgtccttagaacagattccctcatcaaagtgctccaggtggggcacaaggacagggaaacattctctggctgccagtctgtccttgaatccacaaagatgctgaaagcactaaagatctgacatctttttgttcatcagcagcagttattacttgcacaggagataaggcaaaacaaaaacctaagtcagtgtacccaccctcaaggaattaagggactagtaatggggtaggatatcatcaaagaaactaccaaagaacagtttgttttatttttttggagttctcatcttagagatgggttctcatctaaaacttcgattttgtcggttatttataactttaaatgcatcactatcctctcctccaaattgagcccgcaaaagcctaaaacaacagtttaggacttagagcactcacctgagatctgagttttgggactcagagattgtgtgactcaaaagagagaaggaagggaaggagcgggactggccccctgatgttttattactaaccataatagagcaataacaactgtttactgagtgcttcctataaaactgggtagtttagtaggtgattcacatattctcccaattatttatcatacctatccttggaacatgaaattagttgttgatattgatattaaatagctagcgccagaccacatgcaacaaacagccgaggcaggattcagatacatctcaggggaagctgagctgccttttgccaggggcaaggtaccatgctgtttgctgggctcttgctctttcctagggaagagtcggccctggcatgtttttgaagtgggagacatgatccaactcctcttcctggttgcttcccccaacttgtagttccactgtctctctagatctctctaccctaatgctccaagagaccccactgcggcatcacttgtagctcttggaatcctgaaaagcattcttttccccagagttctttacttcccttcccattgttaaaaacccactttctcagtgaagcagatctcagcatgctttttaagagaaaagcaaatgatgaaacttctctttgttaacatacgaagggcgaatagcctctagtcgtctctccagaggatcacattttttccccatttttaaaaaagaggaaccttaatgtcactgatgactttctaatcttaagtacttttaaaaaattaaaaacctgtgtgtgggatgttacaaaaagaaaggcttgactgtgctccaccagacatccagcagcacctgagtttctcagctgccttgttctcactctacgcttgaattcaaagcccctcttcaaagttctatccccagaggaagtaaggtaccatgagggtgtaaaaagggagaggtggtggtggtggtagacaggtttggctatttgtggagtatgatttattcatagtggggactctctacagttgaggtatgtcaaagttagtgtatgatgatggttgaccaaggaatgcagggaccatcagctttatccgcctgcggggagagcaccggactgtggtagacgctgtatgtgaggcaggtggggagctgataagttttgtctctgaacaactttctttaatctcatgttcctattttttttaggcaccgattgacaatggttcaaaaatcaccaactaccttttagagtgggatgaggtaagcttatttcatattcacccatctaaaacaccatttcagaaacaaaattgctgaacaaataccattttattctttgataagacatgctaaacacagaagaaaggcttgctactagagaaatttaaatcaatagttattgactatggaaaacgaagttagattgaagtagtattatgaattgtgtattgaaatatatgtacctggcttatttgcaagcactgctgctaaaagaaaaaaaaatggggtcttatctattttggatctccagtgtctagccagccaataatttgtattaaaagttgactgctttgtcatcttgactgcttagatgcttttgataaggtaaaacacactgctgctcagaaagcataatttgcttttcgtttttgaatgccatgtgtgtaccttggtgtcgcactgttgagtggccgctgtgagagcagagcagtgcatagaagtcacactctacccacgtgcgagtgccctgtgggttagaacgtcctgtatcaggtgccctccttgctgttcatgtccccagaggcccttggaaggtatctacggtggagtgtccttattctcaaagccactgtgtgccgactggtggacccagtgcatttctggctacacacagaatctcagacaggaaacacttgacctagaaggctttcatttctgaaaagcaactgttggctgggcgtgatggctcacacctgtaatcccagcactttgggaggccgaggcgggcagatcacaagatcgagaccatcctggctaacacggtgaaactccatccctactaaagatacgaaaaaaaaaaaaaaaaaaaaattagccgggcatggtggtgggcgcctgtagttccagctactcgggaggctgaggcaggagaatggcatgaactcaggaggcagagcttacagtgagccgagatcacgctggagtgagactccatctcaaaaaaaaaaaaaaagcaactgtactttttgttcctgtagatcttaattgtatttattcatttgcccccactttattctttctctggttgagaaattggctaaggattttaagaataagaaatgtggaatatggggagaaatgcaagttagcctttgtgacttaaatttggagggattgaaagatttagaacttagacttaggcaaaaagtgacttggcaagtgtggaaaaatattttaaccaaacgtaaaatgaaaactggatggaattcccatggtgaaattttgatgcgaaagaggtccgtcatcactttctgcagaagcatattttcccatctgggttgcatctgatcagctagagttccaagttaccaagaacaaccctctattgttcttaggatcctttcgaatagcttgtacatgcaggttggtgaaatctcagccttaacccatgcattctacagattaggtggatttcattttcaggtggtttaattagaaagtgaaaccacctctccagcccttagaggtttttatagtcagtcaggaatgctggaaaggaactcggatgacctgtgagcatatagtaatgtcttcccatctctccctctttgtaaggacaggtgaccgtttaatgaaagtcccgttttacatgtggatttcttgcactcatcgtatgtgttttctcatgtctcgaggttttatatcgagatggagttcaccagtacagaaaaggcatttttttttttcagatatcttcttagggcactgtgtgtgtatgtgcgtgcatgcacacactcgtgcgtgcctatgaatcctgtgttttttgctgcttctctgcccaggaccatgagttcctaagtaaggaaggctaaaaaagttgaatacgtagctcagtgagaaacctccaaagaaaacttgggtgctgcaggaattggtaatggtggctcagttgctggtcccttcccttagaatttgaaatgagagtgtcctggctgatgatgctgagaggaaggatgccacagcctccgctgaagtgggacaggccacgtctgatgatcgttcatgttcagcatgatccattgcaggctagcagtcaaaaaatgtcagatgactgggttttgccctctacctttctgctacttgatctccttccaacttttcctctcacttttcttaattctctgccttctttccactttttctctcccaccttcaaattcctgctggtatcacagctctgttgagctttgctgaagattccaggttaattgactctcatccaccatggatcttttgctaacacagaaatccttttacattctgtggtttaaggtccactttctagacatctcctgccccctcaattctaaggaactcccttgcctttgggtgcaatgagcttcctggcaggagaggataattgaaagaacaccaagattaggaaatatgggttctgttctgagttttatgctgggcagcttgacctctctggtccttagctttttccatctgtgaaatggcgaataggttagttcaccagcttgtatgcatttacattatttatgctctcacaagacagattatttaggattgtctcttctgacaagagaatatttggaatcattttcactgttgtttggcctgttcattaattatttcagcatttatggagcatgttcctcagtagtctgcattgcgcattgtcctatgagagatctgtgacatagtaaagataactgtgatagctgaaaaagcaaacgtacgcctatcctcttgttgtgcttttaaacagacacaaataaagcacacgttgccatatgcttctcaaattgttcggtccagtagcgcttttgctttgtattatacccctctcatttcccatcccccataaagatgaaaaaacggtgctatcaggtttcctggcagtgagaattcaagcagtagtaacaagttcattcctgcccatcctgtcatttcagaagtgaagtttctgacagaacagtctggcagtctgtgtttctaaatgtagagctgagttgaggatcagcagcactcttgagagtggctcacttgggttgggttttgggtcccacattcctatgctatacaggccttagcttcaagaaggaaaagcaaatatacaaacaggacagcagcatctggtctgcaggatgtgtgaacacaagaggctctggccatccctctgaatccttctgctggtagtttctacagccaggtgcatctctctggtaccaggactgtttctagactccatcttaatagaagacagtgaggcaggagaatgggaagtggatgttttgctggaatcaccctttccccacccttccccacccttcccctctctaagggccacagctctcccctcctctcctcttcaaggatatatgccccagccacacacccaaaaacctgtctgccatccagggggctgaagaaacaaactaagatggcagaaagtttttgaggtgcacagagacacaaatcactgcctgagagcgacaccgtgctgctctgagtcctgaagaaggttgtgctcaggcatagcactcggtcctgtctctgctctggcacctggtctgagaatcacgactttgaggtgaggtggcctcatctccatacacgcaaccactaatgttcaggtgtcccctacagccccatatttttattaccatataacagcatggattagagttccagaatacttcagtcttttgtgtttgtaatcacctttgcaatgaaatgattagagtaaaattttgaaagtgttggtaaaacgagaagacagagcatcaagcccagctttcaagcctcttaaagactttcctggaaaaagagcagcagcctttatttctgctgagattaggaatgctgtgctgagttgaccttcttgggaagatctaccttcatcagcagctaactatatgctgggctctgaagtacaacggcatgtggagccctaatggggagcagaaaacagaaacgcattacagtacaggggaaatctgatacaccttctatcctctcttaaattcactgtcattaattttacatcactgtagcatagaattcacttggaaattactcatgaatagttctatactagggttaactgcctgttatttctccattaataactaactagacaacactttaatttttaaatcaatacaagaagttactatgactatgaaatggtaattagcaactaaaaatggaatttacagccaggcacagtgactcacgcctgtcatcctagcacttcgggaggccaaggtgggtggattgcctgagctcaggagttcgagaccagcctcggcaacacggtgaaaccccatctctactaaaataaaaaatattagccgggcatggtggtgagtgcctgtagtcccagctactcaggaggctgaggcaggagacttgctagaacccgtgaagcagaggatgcagtgagctgagattgcaccactgcactccagcctgggcgacagagcgagactcctctgtctctgggggaaaaagaaaaaggaatttacagttgtcgttggcttttcagctgtggccttcagtttcggttttcacctgaaacaggtcagtttttattgagaagctgtggccattcctggccaagttcccttgtggtgactcatgagttttagtgtttagagccaaccgaccccacatttttgtagatttttagccactttccttcttcaggagacaccccattataagcagaaacacagaaggtcattgtcaagtttttttcacttgaacactagatgagtcacatcacattgtcatttcacagtgttcctgtcccccgtgtttacactttaatctacaagcacttgtcattctgatgggtagcagaaagcagatcagaagctcctaaaaaggagcttgtttaacagcacaacaatggctagatgctagatttttcaaggtataggttcttttcacaatggagagtcagtgagatggggaagacggacatcatacttgagatactgtacccactcgccatgcccacgctaatccgtttgactgcccgtctttatggcacccttctaagctacattgactctgtattgcttctcttctttttttttgaaatggagttttactcttgttgcccaggctgtgcaatggcgcagtcccagctcactgcaacatctgtctcccaggttcgagtgattctcctgcatcaactgctgagattacagttgcctgccaccacacccggctaatttttatatttttggtagagatggggtttcaccatgttgtccaggctggtctcgaactcctgaccacatgtaatctacccagctcggtctcccaaattgctgggagtacaggtatgaaccatcacacccagccctgcttctcttcttgatgacatatcactatctggtggaggtgggagtttttctctagaaggagctgtgggagaaggattgaggatatagagggctctagggtagggaagggcttttaggaaaagaaaaaactaggaacctctgggttgcgtcattcataaatgtctgcccagtctgttttaaggttcctaaacagatcgtgatctggccttatttttgaaaacttgagtaaaggggtgaatttaatgggcaaataagaactttttattttagaaaaaattagttccttcaagaaagtatttatgcaaacttggcttgttttaagttctgccttaagatattgttttattttgagccatacagaacgctaactggtgctgctgcaactatcagaacaaatacaagtctcctaagatcttgctatgaatatgtggcatggattcatattgatgatacatatcaataatatgatgtttatctgaagaaaactgaattaatcatctcagctttgtctctctcttcatccattttgtgctgctgtaacagaatacctgaaactggttactttataaagaacagagatttatttcttacagttctggaggctgggaagttcaaggtcaaggacttgtatctggcaagggccttcttgctgtgtcctcccacagtagaagacaggagggcaagacagcacaagcatgagagaggaaaggggaccaaacttgcccttttatcaggaacccactcctgtgataacaaactcacccctgtcatgatggcattcgtgaggataggccccttgcgacctaatcaccttttcaaggggaaaaaaaaaaaaaaaaaaaaaaagaccacctctcaatgtgctgcattggggattaattttctttctttctttctttctttctttctttctttctttctttctttctttctttctttctttctttccttctttctttccttctttctttccttctttctttccttctttctttctttctttctttctttctttttttcttttctttccttttcttttttctttctttctttctttctctctctttctctctctttcttctttctttctctctctttctctctttctttctttctttctttttttcttttcttttcttttttctttctttctttctttctctctctttctttctctctctttctctctttctttctttctttctttctttctttctttctttctttctttcttttcttttctttctttctttctttctttctttcttttcttttcttttttctttctttctctctctttctttctctctctttctctctttctttctttctttctttttttcttttcttttttctttctttctttctttctctctctttctttctctctctttctctctttctttctttctttctttctttctttctttctttctttctttctttctttctttctttctttctttctttcttttttttttgaggcggagtctcgccgtgtcacccaggctggagtgtagcggcgcgatcttggctcgttgcaaactccgcctcccaggttcatgccattccagcctcccgagtagctgggactataggtgcccgccaccacgcctggttaattttttgtatttttagtagagacggggtttcaccgtgttagccaggatggtcttgatctcttgacctcatggtccacccgccttggcctcccaaagtgctgggattacaggtgtgagccatggcgcctggccggggattaattttctaacacatgaacatgggggacacattcaaaccataacagtttctagttcctcatggtaccccaagcaggtaatttaacaccttagcctcggcctttccactggaaaaacagggtcagttatctcacgggtgtgttaagattgaatgagataagttgggcaatagccaagtcagtgtattgattgttccatattgttggcataagtttacctaagcagatgctaagatctgaggtagggaaagtcaacaattacaacgatcatgtataagaaatatgacattcttctgtcaggaacttaaacaagagccctgaggtttatgtcacttgtttgaactaaataaaaagtgatgttagtgctatcatggatgttaatttgctattagcctaacttctggacatgacatgcagggcacagaataaccagaaaaagcgctttgtgggaatgtgactactggagttcccaaaaacctttctcacttgtgacccagctagcccaaaaggaagttcacatctggatatatagaataaccagaaaaagagctttgtgggaatgtgactactggagttcccaaaaaaccttccttactcatgactcagcccaaaaggaagttcacatctggtttccctggtgactaatgagccaacacagctgtaaaacacagtggactaagaatgaaacaaatgccacagaaatcaggggaagcataattaaaagttgagagaggagaaaaggccagcagcaggtagagcccatgcccctggggagccattagcaggtcaagtcaggccaggccaggcaggcccagcagtcctgtcacagaaacctcctgaagcaggtgaccagccccagattgcagcttcttggacatctgtatcattcaggaggagccttgtttagggattgagttggccccgtagaagatactcagtaagagattaattagtcagactcctgcttagctcacgtgttgaatagttcatatggatgatcgctcataatccttctgagtaaacttgcaccttttctggttagataacaactgttctgagaatgaaggaaatggagcagccacaagcacagtaatttactgggtcccgcagcatggatgaagagagctccctgagaatttgcttgactccagctctctaaggtgccacactgcctttgggtgcatggtgtgttggttggttccgtaacaaaaagcaggaaggtcagctttcactcccctgcccaggcccacatgcactttggtcattcttggcaactgtggggattggaaagtggtgttctaggttcattttggctctgtccatcaaagaccatctttcacatgagtgcccactgccacgtcttacggttgtttcagaaagccaagagaattgctgccctactatagctgctattgaaggaaactaagccaggaaggattgaataactcagaggcatctttaggtgccacttcgtggtcaaaaggagccccctcttttagggacctcagtctcagacatccacacacctgcagcagattctctgccttctcttgtttaccctttctcgcatgtgtacatgatgaggttgtgtgtttgggaagcaaacgatgtggagcttcttgctgaggctaaattataaatctcatcttgtttcctgacgcctagtttgtcaactcacctttgttgtggctcctcatggccagctggaagaagactgccttgggccttcgctaggtgaatggaccaaccccatccatccctcggttcatttgtaaatcgcactgacagcctgttctgaaattaagccctcggctcccttcttcccccttccctgtgacagtcttaacacatcaatcctctcaaagcatttgacaacagaggaacctcaatatttggagaaatatataggaaaattttctttgtgtgtttgcttaaaccagaagacttagtgatcatccttggctgtttcaggcagccaagcctcccctcttacagaaaaactagtgtgctgagggataaaatgcctccctgtttatttggtaacatggaaccacaaatcatcccacccacttttcttacctttgaaacatcctctgtgccagagtgtgcaataaaatgaaagaggcatccctgggggaagagtggggtttggcacgagaaacttctgagtccacccaaatgtggagtgtccctccctccctgttaggagcctcttatatatggttatgctgaacacatacgtgctcttttatttctgaagccaacatttatctttgatgttgcctaggatcagccggtgctggaacaacttctaaatatagacactctagcagactaaatcttagagcctggccgtagttcagttggccagtgcaactttatttttcatgtattgttgccatttctgacaggttgaaccatactattaacagagaatggccagcccagaatccttcagcccatgtctggattcagaagccatgggccacaagcacatgacaactgataaccaaattcatggaacttacttagcagacagttaccaaacctggtaagagcagctcaggaaggcagcaggcatggctgtggaagaatctgaaagagactgggcgcagtagttcacgcctgtaatcccaacactttgggaggccgaggcgggagtttgagaccagcccgaccaacatggtgaaaccctgtctctactaaaaatacaaaaattaatcaggcatggtggcgcacacctgtaattccagctgcttgggaggctgaggcaggagaatcacttgaacctgggaggtggaggttgcagtgagctgagatcatgcctctgcactccagcctgggcgacagagtgagactctgactcaaaaaaaaaaaagaaaatctgaaagagaaggagtacagtggcaagataccacatatcaagaaaacatcaggaggagtaagtcacaagaccaaagggagaaagttcaccgtgaattccatcatccttgtgttggccattcttaatcttgtgccaggaatgaagtagttatgaaaaggaacaggaagtatcgtttccaatctattaatttaaaagcagttgaaaatatcagccaacttcatctgttagtgccagtagtgttggaaatacccacttctagtgttgtttgtgccagggtaattagaaatgttagccagagcagccacagcccccacagtctccagaattacactggcaggaaaacactgtagcctgaattaattgggatgtgtgtgagttacatgtatagaatcggccgtggcttgtgttccttaatgggaaaccagcccatttcaaggattcatcttcccgagtactgagaaaaactttataaggatactaagttagtaaagaagaaaaattaacttgaaaaagttcttttgttgttgttttcagtctttcaactacacacttttacaaattaacacaacatatatatttttaaacatactttaaaaattagttgcattttacgaacttaataaaatactttttatatacttagctgccagttttcaagtaggtagaccatctgtaaatttgtttcttcactggaactcttatattgtttgtaaacagatacccagagaggtggaaagctggttacatgaggaagtactttgaaatgttattttatttgttgagtcctgtggttttaggctatgtcatacctaaactgtccccaaaagaccattgcgtgtctgaatttaaaaatctcagccaggcacgttggctcacacgtgtaatcccagcactttgggaggcggaggcgggtggatcacgaggtcaggagatcgagaccatcctggctaacacagtgaaaccccgtctctactaaaactacaaaaaattagccgggtgtggtggtgggcacctgtagtcccagctactcaggagactgaggcaggagaatggcgtgaacctgggaggcggagcttgcagtgagcagagatcgcaccactgaactccagcctgggcgacagagcgagactccatctcaagaaaagaaaaatctcccaagagttctctacatttgggatagcattattaaaagtcttatttcaatctaaaatgtgattctgtaagatgaagtaactgcatagccgttgattggcaattttggttgatctttatcatctaggagtctgattctatttttagcttatacaaaaataacttttaaaattattcagagaggtccttactttggtggatggctttgaaagtaaaagcatgtactaagtgcatgtagaaaataggacccattatgtgttacacatttattttgttttgttttgtttttgtttcgttttgaggcagggtcttgctctgttgcccagactggaatgcagtggcacagtctctgcctcccgggtgcaagcaattctcttgtctcagcctcccgagtagctgggattacaggcatgtgccaccacacccagctaatttttatacttttattttatttatttatatttatttatttatttatagagacgggatttcactgtgttggccaggctggtctcaaactcctgacctcaggtgatctgcccacctcggcctcccaaagggccaggattacaggcatgagccaccgtgcccagccagacatttatttttgtatgctagcatgcacattacattcccccacctcctggctgtttacagtgtaggaggaatttataaaagtttgcagaaattcagaggggtaaaacttcatgctataaacatatatagacatcaaaatagatgagtgtaatattgcataacaaattaccccaaaagttagaggcttcaaacaatcactttcttatgcttgtggattctgggttagggatttggacagggcactggggagtggcatctcatgctctgtcatatctggagtttcaacagggggtgctcattggctggggactggaatcttctggcagtatcttcactcacaagtctaacatcagtgctcactttggactggacctatctggggctcttcacatggcctggggctcccacacagtgtggcagcatcagggtagtcagaatccaaaatcgggtgtcccagcaaaagtcagaagctgttaacacctttccagacccagccttggcttcatttccactccagccttttggttacaagagagtcacaagaccacccacattcaagggaaagggacgtagactttgtttctcaatggatagggaatcggagaatttttggacaggtttaaagtaaccacttgtgatataaggcttcttgtctccttttggtcctgagaaaccattaacaaatttttttttctttatctttgcatatcacatacagtgttttaggtaccataccctaagactgttagatataaggtcatatacttttaaagtacaacataactctttttgcctatccctgattcttttctgagtattctggagatgggtagaggagggaaaaatgtgtacccagaaatgcagtgacaggatgggcctcatacctcataaccagtgctactcagccagccggtgagacgtgcctcagtggctctcaaataccaatcttctcagttagcaaatggaagagatcattctgtctgctgccttagtgataagggcagggaacccaaacagactgtttatctccagttaatgtctctgcctcagttgtacttgaaaagcaggatcgtgtgttctgttccctcaggtgactcacgatagtgcagcaaagtgttttagttttagtttttttttttttcagggaatataaatgtatttaaaatctttaacagttttcatcttttaactacaaatttgaaagaaatggaaaaatattaaagtaggtagtaaggaggtaaaagaaaaaataaagatgttccttaaaatatttaaactactttctatttataatttatccccaaatttcattttagagaatggcagagctggacatggtaactcacacctgtgatcccagcactttggggaagcctaggttgggtggaaggacagcttgaggccaggggttcgagatcagcctgggcaacatagaccccatctgtaccaaaaagaaaaaaatggaaaatttatccaggtgtggtggtgtatgccggtaatcctagctactcaggaggctgagacaggagaatcccttgaacccagcagtttgaggctacagtgagctatggtctgtttgcaccactgcactctagcctgaacaacagagtaagataccttgtctctcaaaaaaaaaaaaaaaaaaaaaaatatttgggaacaatatttctcccttgtgggggaaaaagaaaaagtctttgtctctgagattatgatcgtatcttggaaatgttttcaggggttgatcattctctgctgtgtagccacatagtgctttttatatactctccaagctcccttctcttgcccctgtttttctgtgattggggcctttcatagtctggcaaaaagttggaggttattgccattcttcagaatttagcaggaccctgtaggaacaagaacaacatctagactcccattattattaggacttgaaaccaaaaatgtgtgacccttctaaaaagtgagtgaggatgaggatgaatcaaagcggaggcagatgctgatagagtatgtagtattctaagcgttattaggctgggtcttcccccaaaaggtgatgacttcctttagtatgtcaatctcagaatgaaagaggcacttgcccaggttcagataaataaggtgtccagtttagagggcaggtgaactctgtggtaagagtatggtatcaggggacagggctgcataaggcacactggatggaacagagtaagacgatccagtggtatctagaatgtgaataatatacaatgtatttttgttcgatgattagaaaggagaaagaggcaaagctgcgatcccaggcttgggaaaggctgatctgatgcatgctgtgaatatgagtcgacttactgacgagccaagtctttcctggagagcatttttgaccagaagtggtagacaaacaccctggtccctggttggaaaacattaccccaggttgatgaattggtgctcttaggctaggtctgggtgtggaatgaagatagataagcaacaactgtgaattaggttgagtgcgaagaggaacactcagcttgggaaaggaaacaaaccacgtttgcaatgcgtcctcctgcgccagattgagcacctcgaggtttatctgcacacagttggtttgtactccaagatttcttcacattctagtaaagattaaccttgcccttgaatgaacttgggctgagctgcagaaacaagcatttgggcatgcccaggattgcaaaatggaaacaagccagtgaaccctgaaaatctgcccttttttggctcacagacactgacagtagaaagttaggctggaactggctggggttatattggttcgtgtccagtgaggtcagtagcccagtggctaggtctgttccagaatgaccaatggtgttccctctgaccagtttctctaattcaggcgaagtatcttttctatcccccaccaagaacaagaaccccagtctcaccaattctgactgcttccatgctgcgaacctgacccaccaacgcacagagaagtggagtgcagctaggaatctcttccctcagccctttcctgcagaccagctgacttgcaggccctggcagccccactgaaagctcttactctcctctgtgtgacataccacaagtggcctagcagccgtagctggccaggattaggcctaggtcatggctgtccctgctgcctgtgtttgaccagctcattgatgacaacagatctgaaaagtgtcaggatgttacccatttctattacagccatgttttagtagggaactttgaacaaggctgaatttaaagtattaaaaactaagtttccaaagttaagtcagtgtatctcagtaatcctgtgtagtctaaattagattttttaaaggagagaaggtgccataggttataatctctcaaaatctctgggagctaaacagcctataaaatatgaaagttgtcatttaccatctctaaaactccactggcagtaatggtttggatgtatttaacttctgataaacaatgataaacattcactttatcactcctgtcagttcgtgtgaatctttcagtcctctaaagcattagctcttttcttttttaactccatttctgtcaacaagaacaggaaaatattttgtttataaatgctatttgcaacctgggaccggtcttgttttatgaacagattctccaaatcttctatccctttgaacacggacttactctactctcatgcttaagctccagagccatccgagagcctgatgcagtagacagaccagcatgctggcatcggatcactggagccagtggccttctccagttcacttgttaacttctcagctgcagatcacttttgtactgcagtgacttgtgaacattaatttttttctttccagataatgcattttactgtattttattttattttagagacagaatcttgctgttgcccagactggagtgcagtggcgtgatctcgactcattgcaacctctgcctcctgggttcaagtgattctcctgcctcagcctcccaagtagctggaattacaggtgtctaccaccacgcccggctaatgtctttaatagagacggggtttttagtagagatggggtttcaccatgttggccaggctggtttcaaactcctgacctcaagtgatccacccacctcggcctcccaaagtgcgggattacaggcgtgagccaccgcacctggctgagatatgcctcttatattaaacttcatgttatacatgaatatgttcttttattcaaaacttctctcatgtctgaaatactttaacctgctttcccttgtttttgttttattctcaatgacttctaaaaattcatcaataagccttaattctttaactgtcaaatatttctattcttacctctacagactctacagacgatgcttccaaaacttaattccaaggttttaacaactctggatctttctaggtgtccctatgtttatgcacatagtagtacatcctggaagttgttatgatagaaaatttggcatgctttgtctatatgggttggagtttatttagcggttgttcctgattctaacaattgttcctgactccaagatttcttttttgtttgtttgtttttgagatggagtcttgccgtgttgcccaggctgtagtgcactggcgccatctcagctcactgcaacctctgcctcctgggttccaacgattctcctgcctcagcctcccaagtagctgggattacgggcgcacatcaccatgcctggctaatttttgtgtttttagtagagatggggtttcaccatgttggccaggctggtctcgaactcctgacctcgtgatatgcccacctcagcctcccaaagtgctgggattacaggcgtgagccactgcacctggccagatttcttcagcttgcttattactcctacttcacatttacttatattactccctcacatttttacttttttcacaagtagaattttttaaaatgttagcaatataggaaaatgtcttgaaggtcacacagtgccccttctcctaattctttagtgagcctgagtgctctggctctcttaaaattcatttctgccctttgaactcccccaactctttttctcatttgagccacagtctggtttctactgtattaaagcaaattaacctagtaagaaacagactgacttttttttactggctacagttctaagcacaagtaaaggggaaaggagaccaaataaagaaataggaaaaatgaggcattgaaggggagccaacatggggtttggaagagacgagagcttccgccatggcaggatgtgcctttcttgcactgtttactctgagttcagaaatagaggaggaaagaaggtagatcatgccacagcctgaaatggatacgacacataccagggctcccatagagtgtaatcggacgctgagtgtaattatgcaagtgtgtgcatatgaataaatcatcttcctcaacctcaacactcaaggttgaagtaagcataagggcgtgacatgccagccacatagtgagttcactcaagaagcacctgagaaatgtcaggttttactcactgcactcccccaactcggccgccaagttgcatctgaatgcaccttgaacccttgataaaatgaactttcaatcttaaagactgttagatcttccactcttttccatggtgaaaggtgctacctggctcgaggaggtgggtgggacaggggttcatttgaggaggatgaatgtggtgtgtttgtttttattgtgttcaccgtagtgactttcaagctagtggtgtgttcattttatttttaattaaaacatcacctggaatgtgttttagtggtatttgaaggcctgctgaacaaatgtaacaaaattacataaatttgtttatgtaaaacatgtggttgctttgttttttgtaaaataaatagagaacttccaacagattgttcaaggccctgggcctatccagttagaatgttaagatccattcaatgttagcatatggttttcttttgcatgaacatggataagatagtaagataatgggggttataacaaactgctgataagagtgttacatgcctctgagtatggcatagggcagttaggcttttttcttacttgttgggcctgttatgagaccctactaaagtgttttatttgtacttcaaggaatttgaagtatcatgtaaggctaggaaggcattcaaaatacatttttagcctgacaagaaacttagagtgactgtaatatacatagattaattcaaccagtgttccaagtacttatcattcacttccactctgcaagcattgattgagctctcagtttgtccaaagcactgttacgagcaaagtagacatggacaaaatgattcaaaggttcgtgaccagtatcagcgatcagtgaagaaacaactcaccatcactagaatgtactcgtgaaggtattggaggccactgcatggcaggagagatgcagctggagagggccttgtatggcacactcagctgcagagatgggtctttaggtgctcagaagttactgggaaaggctgtgtattttcagagcctgtgacccctctgtggatgcagtcagattcttggttgatcaggctgggcattttcggccaatccaagtaaggaagaggatcttggaaattgtgatcgttaactggagcatcgtcttatgcctgaaaggaccttttttaatcttgttaaccaaaaaaaaaatcactttagatataccacaggtgtagtaaattacctgtctcaattacagaattttctgtagtgcctttatgttaaagatgagatttcatcctagagtgctttatctgctacatgggcacttccctataagcttctattgtttttgttcattcaaactaggaaattaaacatttattcaagatgttcaagatgctctttcatttatttaggattatctgttttttttttttttaagtatatgcattgtttcattgtttacttttagggaaaaagaaacagtggtttcagacagtgcttcttcgggagccagaagcactgcaagttgacaaagctttgtccggcaatggggtacacattcaggctggccgctcgaaacgacattggcaccaggtatgatatttccttgtcctcttgcccttcagcctttggatggtgaccttgagccttcttttgcatcactggaaggcgtgaggaagcctgctgcctccacactaaatcaactggaggttttccaagatggagtcctaatcagaggagagaaggcctccttcaagctggtgaatgccactatggcctctgcagtcttgcaagctgtatggcgaaggccccactaggggtctctaagaaccaaggtgaaggtagcagtacagattttgaaaggaattcctcttggagctttatttttttagataacatgcctttttcttttatcactttagcgagctcttgattcaattgccctttttcaattacgtgagtgtctcctggtacaaagaaagagatgctgggctggccattgttgtcaagcccagggcagatatagaattggagaaaacctggactgtcttggaggcccctgcaggcctgtagcctgtatgagaaaggcaagaatgggtgtactgtaaggtatcaattgattaaagaggctttgaaaaggctacatttcaattgcacttgcggggtaactcttgattaagggaaaaatctttttctttcattcactgcttgttgaaatctttttaaaggctttgcacatcagtggtccccaaccttctttccagcgtaaagaacctctttttaacatcacaaagttttacagacctgcctcctccaccatggtagccattatagttttagagttccctggttgcaaaagtcataccgataaaaagcctatatggttcaagaatttttaaatgaattggaagcatccaccaactttcaaaaaacagcactgtatatattggtaaaacattatttcatcaacaaatatttgttgctcatattgatttgaaggcctcttgacctataccttgatagacattgcactgtgctatgccttctgtccagtgcttttgagggggaaaatgaattcttaagtaccattgtccttcagtttccacaggggattggtttcaggactttccccacctccctgccatggataccaaaatctatggatgccccagtccctgatataaaatggcttagtctttgcatataacctgcacacatccttccctccttaaatcttctttaacttgcttgtaatatccaatataatgcccacacatcacttcattcatgtggactcaagatgcggaacccaaggatacagaaggccagctgtatattgtcttgtgacttgatgtgtgtgtctagtagaagatcatggggtggggggatggggaagctgaaggtggttatagggaatatcacacacagcatccttgcctggctttgcttactctacctgctaggctgagttgggtagtatgcaggctgagccttcctcttttaaagtgccaagcctgttcacatgcttctaactgcgtgcctcactttctttctctacagtggttacagccaagaggtggtatgctacacattaggaaatatccctcagatgccttctgcaccaaggctggttcgagctggtatcacatgggtcacgttgcagtggagtaagccagaaggctgttcacctgaggaagtgatcacctacaccttggaaattcaggaggatgaaaatgtgagttttacagattttatacctctctgtattttgtacaagtcagtattgttataactacagggcaccatgaaatgagattaactgcataagttcaaaactaaactcttttttttttttgagacggagtcccgctctgtcgcctaggctggagtacagtggcccaatcttggctcactgcaatctccacctcccaggttcacaccattctcctgcctcagcctccagagtagctgggactataggcgtccaccaccatgcccagctaattttttgtatttttagtagagacagggtttcgctgtgttagccaggatggtctcgatctcctgacctcgtaatctgccctcctcggcctcccaaagtgctgggattacaggcatgagccaccacgcccagcccaaaaccaaactcttaatttctacctctgtcaccaccactaccaacagcagcctgttctttcccatctctgtaaatgacatttccattcttgtagctggggaaacaaaaactcttggagtcatccttgacccatatataatcagacagaagatccttttgaatcttccttagaaattaaccatttttttttttatcatctccacagctactacccttttatgaggcgcttatctcacccctggattgttgcagtaacatgatattgttattggattatagcctcttaatattcctaacttcatctttactaggctacagcctgttctccacgcaaagcctgggtggagaacatgatcttgtaaaatacaaatagatcatgtcagcgccctgctcagaatccttcctgtctcagtgccttcccctctttttcacagtaaaatccctagagctcttacagtgcccaccgggtcctgtgtgattgggttctccattactttcctcgttccttccactgtagtcttatcagcctctagtctgttcttttttttgagatgaagtcttgctgtgtcacccaggctggagtgcagtggcgcaatcttggctcactgcaagctccacctcccaggttcacgccattctcctcagcttcccgagtggctaggactacaggcacctgccaccatgcctggctaatttgtttttttttttttgtatttttagtagagatgggatttcactgtgttagccaggatggtcttgatctcctggcctcgtgatctccttagcctcccaaagtgttgggattacaccacgcccagccagcctctagtctgttctttaaacacaccaggtgtgctctggcctcaaggcctttgcagttctgccttctggccagaatgtccttccggatgtctttgactcccttccctcattttcttcaggtctattctcatatatcatttctttggacagtccttctctgatcaccctgtagaacagcaccacccaatagaactttctgcaatgatggaaatattttataatttgtgccatccagtatggtggcacttacacacatgcaactctcgagcacctgacataaggcttgttggcctatagtatggagggtttgtttgcttgtttgttttgagatggagtttcgctcttgttgcccaggctggagtgcagtggtgcaatctcggctctccacaacctctgcctcccaggttcaagtgattctcctgcctcagcctcctgagtagctgggattgcaggcacgcgccaccacgcctggctaattttgtatttttagtagagacgggatttctccatgttggtcggactggtctcgtactcccaacctcagatgatctgcccaccttggcctcccaaagcgctgggattacagttgtgagccaccatgcccagtcagtactgagtttttaattgtaataaacttaaattcaaagagccacatatggctgccatatttacctccagcagctgtagaaagccctcactagttccaccattgtattctcctacctagctttagtttttgtcatagcacttaacactacatgacatatgtagtagtttttctgtattgtcttctcccactggaatgtgaacttcttgtggcaaggccttttctgttcttgagcagtgctgaatccttagagcctagaggacaaccagacacagagaaggtgctaagtagtattttgatgagtgaatgatagaatgatagagacagaactattgaatgagttccctgaattcaacttttagtgggatgtttgccctcctaaaggattatgccctttcccatctaagctgtcctttctcccttggccagaagagggcactgtgtggtcaggaagctcagccacacgttactgcatagcacattgcagcttgatagtgaggacctcagtacaaaggacttttttcatgataacattaaaaatgttaaatgtattttcaaaaagtacttaactcctttgtcacaataaatttgaccagacccaggaaaaattacagtgtgatggagataaatttttatttaaaactcaagtgctatccacaatactctgggcttctgatttttctcttttgcaaaagtagctaccagacctctggccagttgctgctgatggtagagaaaggcagtataaaaatcctatattcaaaggtatttaatgcccagaatttttgatactgatgtttcttcctggctttgccttttcaggataaccttttccacccaaaatacactggagaggatttaacctgtactgtgaaaaatctcaaaagaagcacacagtataaattcagggtgagtcagtcattttgctgcctgaactgcttaagaatgaaactgttttctatttcaccatttaccatgtcagattgtctctacaggttaaaaactgaagttgacagcactttacattttgaaagtaacatttataaaatgcacaccatgctttatttatttatttatttatttatttgagatcaagtctctctctgtcactcaggctagagtgcagtggcacgatcttggctccctgcaacctctgcctcccgggtttaagcaattctcctgcctcagcctcccgagtagctgggactataggggtgtgccactaggcctacgccactaggctcggctaattttactttttattttttattttttgtatttttagttgagacaggagtttcaccatgttggccaggctggtctcaatatcctgacctcatgatccgcccacctcagcctcccaaagtgctgggattacaggcgtgagccactgcacctggcccatgctttaattttaaaaccagtttgtgagcataaaaattgtcatcatgtgctgtaataaattgtgtttgcagcatggccaggtgcccttgcctgggaagaggcataccagatgctggagtgtacctgtcactcacttgcactccatacctttttcttttcaatcagacttctctttgctcttcagcccatttatttttcctcacttgtttttaattttctcttccatgacccaccccctcctgacctgagctgtctttggtcattaacagccaccattaacgttactataggactatgtgtagtagccaaaaaagtgaatacgactttataatcactaagagatcaaaacagtattctgcagcaccatattttctagtatgacaagtgtgtattttggaagataggattgtcttctgattccacacgttcttctctaagtggtggaccaaatgctgttatttggcacatagcaatcactcaataaatagttgccatattatcaagtgcagtatgagactatttgaaggaaatgataatttttaacattttttaaaacccttattattgatgctggctatgagaacatagctatactgctaacatttctccacaaggtggcattgccctactctttaaaaagtggggctatttttatgtccccactcaccccacattttcctttcacgaaacaatacgaatcaggtgatgacatacttgttttattatgtctttttgaaagggtaaaaatatctttaaaacccaccttatggttttattttatttttatttttttattttttgagacagggtttcgctgttgttgcccaggctggagtgcaatggcatgatcttggctcaccgcaacctctgcctcccaggttcaagggattctcctgcctcagcctcctgagtagctgggattacaggcatgcaccaccatgcccggctaattttgtgtttttagtagagacgaggtttctccatgttggtcaggctggtctcggattcctgacctcaggtcatccacccacttcggcctcccaaagtgctgggattacaggcatgagccaccatgcccagctggttttatttttaattgttaataaccaactatacagtaaatgatttataatataaatactgttaaatcgatacttgagtttaaaagagaaaaaaatgtgtgtctgtctgagtttatgggtgccttcatctcaccatgttaaaaagtgaccattaatttagtgatccctgataactaaagcatgttaacgtttccttggttgtgttctagctgactgcttctaatacggaaggaaaaagctgtccaagtgaagttcttgtttgtacgacgagtcctgacaggcctggacctcctaccagaccacttgtcaaaggcccagttacatctcatggctttagtgtcaaatggggtatgttttactgctgctgctgctgctgctgtatttttttttctttggatatatttttttaaaatgattaattttagtagtgacaagccaaaaaaattatggattaccatttgcagaagttttctacattcggaatatatgtgtgagaaacatcctgagaagtctacaaattggaatggacagtttcgttaaaatgtaatcataaaggacaattaaattttagtggaaattaaaatggatgatttttaagagtatctcatttactctatgattttcctgtacataccttttctcctgtatttttaaggcattgatttgaatgtagtaatctctgtatgcatcgttcattcttcaatagttcatccttaaaaaattagcaatacttaagagaaaaatttggtttataaagttaatattgaaaataaatttcagaatttaggtttattaagtaaacttcggcatacagaatgtttaagttgcaatgaattagggatagttttgttttcattggtgtttgtttgggaaattttagtattaaagttcataaggagtttgaggttgtctggtaaaaggatattgtgcctcacctctgctgtgtggattatttcaataaaatgaatacagttagaaggttgataattaatatgtaaaagtgttatgcatatcatttttactattgtcataaaaatattaactaataggcaaaaaaagttgaaatcttcaataaaattttaccttgcagccaagtaatataaggagaatttaaaacattattacaccaaccactgagacatattaactgtttcaagttacctaataattgtgagatagaattattaggatttctgtttccccgaaagatggatagaattcagagaaatgataaaaatttagatgtgcttttagccagaccatagagcttttctctcaaagaacctcagaaagttctgtcaacactacagctatatgctctaatatttacctttataattattattgtaaatatctactaaaatatatatacattaatggaaatcaggtgaaggagaggggaagtgaatattctaaatttatatataagtaaaacttaaggttttttagaaaaatctccgttatgtctaagaatatcgaggcggcagacagacaattaaaagtacattctttatagttttgcaaaattaggctgcaaagaaagtgttttctgctcagaaagtaaaattcctgcaggcacagagttaggggtagtctatatacccaaggcacctagggctctagtaataagccagaaccttctttctcaggctgtctgctggtgcactggcactcattgatccacacctctggtttcataccacattcacctggggtgtaaagtttgcttggtaggaaactgtgctagaatggacgtattccatttggatattttatttattttgtcaataaattttgtacttctctttccgttcctttccatcactcaaaagaatctggtcggctgggcgcggtggctcatgcctgtaatcccagcactttgggaggccgaggcgagtggatcacctgaggtctggagttcaagaccagcctaacgtggtgaaaccccgtctatactcaaaatacaaaaaaaattagccaggcgtagtggtgggtgcctgtaatcccagctactcgggaggctgaggcaggatactcacttgaacccaggaagggttgccgtgagccgagatggagccattgcactccagcctaggcaacagagcgagactcatctcagagggggaaaaaaaaaatctggtcactgataaaataagtgaaataaaaagaataaaataagaaatatgaacatatatcatctggtataaaaatcatcaaatatattaaagagcaccttcaagtaaattcaacaacttgatcagtttgtaccgagtttttggttcatatttcactacacgaatggtctttgacatttctagatttaagaactttgaataatctgatagtattcagagattcctgggttttttgttttttttttttcttttttttaaacagtggagttggtgaaataaattattttgccttttggtcaagtctagaattaagataatataatggtatgagattttatgagtcctgatgatgtttaccgataaaaatcaatatccttttattgctaataagacatttggttattttccagatcctcctaaggacaatggtggttcagaaatcctcaagtacttgctagagattactgatggaaagtctgaaggtgaactttttggcaattgttttattcaaagccagtagcaagctctattttctgatatagtaaacatctttatagtaatagcaagcaaccattaattctaacgatagaactattattacagtaaacaaactttaatcacatattggctgtttttctatttcaaacacagcaccagagatcagagtctgcttgaaacttacatttgtgttatttaaaattttttctgtatctttttcattggtgttttgtttggttgatcttttgcttttgtttctttggtttggtttgtttttgttttgttttttgagacatggtctcactctgtcacccaggctggagggcagaggcacaaacatggaccactgcagtctcaaactcctgggcttaagtgattcttctgcctcagaagatgaggaagaatacatttttcatagtgatggggtctcactatgttatctaggctggtctcaaactcctggcctcaagcaatcctcccacctctgcctcccaaagtgctgggattataggcatgaatcgccacactcagcttccatgtctttttttcaactagaattcctaattaattggataaatttagtgttttcatctcctaacttgccatacgttttctggaaattcttataagcagccgggagcggtggctcacattctaatcccagcatcttaggaggccgaggtggatggatcacgacgtcaagagatcgagactatcctggccagtgtggtgaaacccccgtctctactaaaaatacaaaaattagccgggcgtggtggcgggtgcctgtagtcccagctacttgggaggctgaggcaggagaattgcttgaacccgggaggcggaagttgcagttagccgagattgcaccactgcactccagcctggtgacagagtgagactccatcnnnnnnnnnnnnnnnnnnnnnnnnnnnnnnnnnnnnnnnnnnnnnnnnnnnnnnnnnnnnnnnnnnnnaaaaaaaaaaaaaaaaaaaaaaaaaaaaaaaatcttataagcaaaggaagtatcagaggcaatcagcaggaatagtgaggtggagatagtgaaggagtgggttcagtaatctacaaattcccatgcatgaaatatatagtgttgtgggctagtgacaagagtcgcacttttatgagaagtttagaaaatttctttccgacttcattgtcattttacttcagattatttatttattactatttatactgggtggattaacatgggacaaatgttagaaataaaattccttagtgcctttttaaaaattctgaggttttctttcgttcattagactttaatagagaaaagtatagtcttcaaaactttttaaatgacatatcatctcaccactgtaataattcctctaaccattagtttttttaaaaaaatggcactgcttatgccttaagcagacaggattgatataacttttacaagccagcagtgctgatgtgtggttggctttttattctgtaccatgagaaccacctggaattttttttgtttttaaatctattgggtcctattttaagctgaaaacatgagaattcttttgagatgagcacagctgttctaaacataaaatcatattttgtgctaaaaacctggtttagaactgcctggcatggtggctcacacctgtaatcccagcactttgggaggctgaggtgggtggatcacgaggtcaggagtttgagaccaacctggccgacatggggaaaccctgtctctactagaaaaaatgcaaaaattagctgggtgtggtggcatgcgcctgtaattccagttcctcgagaggcagaggcaggagaatcgttggaatccaggaggcagaggttgcagtgagctgagatcacaccactgcacttaagcctgggcaacagagcaagaccctgtcttggaagaagaaaaaaagaagaagaaaaaaaacctggtttagcttttcttcattagaaaaacccacctaggatagaagtcatgtgtatgccaatggctccttgtgaatatttaagtatgttttgaattctcatggctccctttagctactgatgacaaatcaaatcaaaagtaggggccattctagacttacagttaacaactttgccactgcatgactgagtgagtgagtgaatcttttcagtaatctttgctcccagtcaccttttcagtacaggttttttcgacctgtaatatcaggatagttcccttttttcatctggccttagtgcatgcgactctatcaggaatctaaactaataaactgctgggggaatttgtggaagttacgctacttaaaataccagggaatactgtaaaagcatttctcctaaaacaacttcatgtagtaaaaggcttttgtaaagtggtcagctggaaacacagcatgaaaaggaataaagcagaggagtgaagagcctcctggtggcccagatttgtgagtcaggcaggtggccgaggcagccctgggtggtcttgcgtccaacggcatcagcctcagggggcacccagactcctggtgactgtttctctcttcagttctgcagagtggtcaagatcacttgggtcatgccacgtttggtctttgtcaccctggtaggcatttttgcctttttttttttttttttttttttgaggcgcggtctcgctctgtcgcccaggctggagtgcagtggtgcgatcttggctcactgcaagctccgcctcctgggttcaagtgattttcttgcctcagcctcccgagtagctgggattacaggtgcccgccaccaggcctggctgatttttgtatttttagtaagacggggttttgccaggttggccaggctggtctcgaactcctgacctcaggtgatccacctgccttggcctcccaaagtgctgggattacaggcgtgagccaccgcctgtaatttttgtcttttaagtggggctccatgaaggcagtcagaaaacccagtttttaaaagagggtttcactacctttgacctccaggcaggtaagaacagggagaaattcttgcatgctgccccagacttgccagaagcctcgtggccaagaagtagccccgtgcctggctgcccctgaggcctcctcacaccaggagcatttcatagcttgcccacccctgttctgtgtctcctaccactccttccatgccaactgcacgtttcattatggtttcccacatccaaacctcatagcaaatgtaatcgtggtgataaaaggtagtctagccagcaacactaagtattaaaaatgactccatgttattttggtatttaactttgtaaaagaaaaaggaagagctttctggctatttaaaaagaaaaagaagatgttggttttcctgaaaacatagagctttttcttgtcagcaatggctgatatactccattttttacaagaggcataaagtcatgcataagtcttgttttacagcgaatcagtgggaagtggcctacagcgggtcggctactgaatacaccttcacccacttgaaaccaggcactttgtacaaactccgagcgtgctgcatcagtaccggtggacacagccaggttggttttgtttccatataaaagtaaacctctttgatcaaattcagaccagctgtctgtaacatcagaatcaaattgcagtttaaacaatgtatcttggtaatgcaacctgatagtatcaagtcaggaaatgaaaaatagagctttttgaattgctctttaaaggtataagataggcctaaatgattccctactgaattgtggtattttcaggtacatttgtcactcacttatttctcagaagtctttgacgtaatcacctgtgacggttgaaaattatctggaatttgcattgactaaataaaggagacctcggttattgcaatgattaaaaaactatagaatttctagttaaaagatgagacctgtgcagcactgctgttatcacgtctatcaattttaagaatttgagacataccttcctcaaggtactttactgccatctgctggaaagttgttgtaaaaacaatgtaaatccatgatgactgagctgaatggcacctcctcaagttttgtggtacccaacgtacacatctgtaggcaagatccattcttttgtttctactatttatatgacctcagactaaccagttaacatgtcaggagtcttagtttcaaccacattgtactctcataggctcagaacaacctaataaatatacatggagtactctagaaatgaaataattgttatctaaatggttttaacttacactcagaaaactgagtgagaaatgagatgccaaaagatactttcactgtagagatatttaacattatgatttgaaaccactaataatttagaatgaaagagaaggagagatggtggcttacagccctgtgctgggttgacttttcaagagaatacctgccgtttgaatgcctgatttttctagtcaacccacttgcaacatcagtttttgtgtttactttcttttgcccccaaggatggtactaggacatctagactgcccatgtagacactccctgtgaggagaaggtccagctggaccatctttatacagtgccgaagctttctggagtgcctcccagggtggagtaaatccaaatcaaagctgagattatcagtggtacttcctatgtgtgaggcactacacaaggtggcactgagtctgaactgctcaaatgcatagaggtcatttcctctgtgccacttcttagggagaaaattgaatgtggctgagctgtatagctctacctgattttctcctgtctcaggaatcgggtcagcttccatatcactagccttacacaaccagatcctgcaaaataaaggcctacttattttagcgttaacagtgcctgctggttaatgtcagaatcaattgattaatattgagtttatttgcttttctgctctgtatgtgaatggttggccacttatggtaccattttaaaatttcatccagatgtcgttttgtgttctcttctgtcctcatgaagggtctttctaattttgaattaaaggaaaagaattgcttaggatatacagtactcatgtctgctaatctaacttcaaaaataatcatttttgtttttcccagtgccatatgaagtctataaccacccttaaaacacacacacatacatttatatgaagatcttaattgcattaaaagcttaccataatgtgcacacatttagtgtgtaaccccttttcggtaacatttgcagttatggggtggaatttgcctgatatgtagaggtctgataaattcacagtaactaagagatggttctctctggtgtttctcctgcagtgttctgaaagtctccctgttcgcacactaagcattgcaccaggtcagtgtcgaccaccgagggttttgggtagaccaaagcacaaagaagtccacttagagtggggtgagtgaacaaaccttcccgttgacattggtagtttggacaatcggagatgaagacttacgctttgtagttaagtttcaaagctttcttctaaagaccacgtatgtttttgtctgttgaagatgtccatattcctcttgaagtatgttgacccaggttttttatgtgtgtcattccccccatccacacccccaacactgaccctcatcctcctcttcctgatggtgccacacacctggtttatcccccacacttcaggggacacttttctagggagtatttcaagaacagccagtctttttcagaaagttttcaactttattaatgggaaaaaaattttgtactcaatttagaaattaaaccaaagaatagtttataagatcacatggaattcttcctcgtctctgtgtgtaaccacctctgctgcattgtcctgtgtgggtcctgatgtttttacagcgttgacttaaactgtattagcgtttttgttgtgccaagctgtttacaacatgtataattacaaatacaaatgtacagaactctctagcagactattttttcccaccacttatgtctaaagtataataaattgtgccaacctggggtcctgtattttgatttaatatgacctttggtttcaaattaaagacatttttcttccttctttttcttccatttacctagcattaaaatatgaagaaatatatctaatgttcctatgatttggggattattttatcaatgtaattaaataaacttcaatggacttgctttggagagtatggataacatcattcagaaacttttatttttatatctctttttggtgggcagggattcttttgtaagggagatactgaggacaggccacctatgtgatattttgcacaacttgtgtgaaatctggtgcagtttggtcaactggaagtacaaagtgttctaagatgaaaataattcttcattcccagatgttcctgcatctgaaagtggctgtgaggtctcagagtacagcgtggagatgacggagcccgaagacgtagcctcggaggtgtaccacggcccagagctggagtgcactgtcggtaacctgcttcctggaaccgtgtatcgcttccgggtgcgggctctgaatgatggaggggtgagtataagcccatacactgtaaccagaatcagaatgcatagtcagaacccaaagtgctagcacttctgtctccagcctcctgaaatttttggcagtcttaatgcaaccttgacaaccattaatgcagtgtctgtaaatcttaattctgagttgatattgttgtgatttcatatagacccagcattagacgttttttgtttcttttgtcctcatatcattctatgaagacagcactcaaggtaaataaagatatcaccctgtagatacttttgacaattttcagaaaatttccttttcttctattgactttatcagttaagggaaattaggaatatataatagttctaataaaagttttatactctcttgtctaaatgaaccagcaacatcttaggtcagtttttacaactagagaggggtagcagctggggacaccagcttgtttttgttttgtttcaagtgaaaactgtaggactctctggccttccttctattgctccatttggagttgtcaagttgagctatcagagattgagaatacatatgtctgtgttatatccataaaggtggttgtcctttttttctttaaaattgccaaatgatgtagatttggggggagatgaataatgagcagtgggagtcccattaactgtgaggcttttgggtgggcttagagactgatgaagcataaaagcgggcagaagggcgtgggtaaagccagctaatgctaaatgtcccatccaaagtgccagtagtttgtatagatgggctccctgcaaataaatataattagctaattgatttttttaaaaaataagaaaacccaacttgcagtgactttttgttttaagtgaaagcaagtttattaagaaagtaaaggaataaaagaagggctattccttaggcagagcacccgaaactggatttcttctaattctccaatagaaaagaatttcagacacaacaatgatactcaagtgaaaacaaaaaagtctaaacattaacgcctatgcacctgaacttataatcatgtaagcgaaaagaagatggatggtggtgaacacactgttgtgtctaccccattctctcatcaacttttcagttactgtctgccacaacaaagataaatgtgcaactgggctggtgtgagttgtactttgctcagccctttcactgatttatcctataaagaaactatcttcagcttgggtttattcatgttgtattagaaattcaccatatatattgctgtagtcatcttccgaggtccatttcagagagcttccccaactcccgagcatctttgcatgttatgttgagaggtgttttttttttttttcttccccatctttttttcacattttgacaaggacagtcatatattttgttatcctggaaggtttttactctgccccaaacctttgaagtatcaaatatgctaccattaaaatgggcggttcaggtggctgtgactctctcaaagtgtgctaagtctctagcaattcctggctctgagcagtgtggtcactgatggtaacatcaggattgccgtggatacccttgaataggtgaggtgatgggaacacactgagaaaacattacagaagcattcattttcaaaatggaaagtaccagtaactagaagaaatacctagaattcgatcaccaacaattccaagtatatttttatgcattaaaaattaaactgcagtgggcatctgacttagttttcttggatgtcctctgagaaatatgaaagcagattgtcctgttttgtcaaaaatcagcatatttttatttcagatgtcccaagaaagggaaaatattttgtcaaccaactaattattttccatttaaaaaaatgacagacatctactactcagggaatgtacataggagaaaaacttatacacattgaattgaaagttaaaatcattgggcaatatttgtaaatttgttgtgttgatgatgatgttagcctagcctttatttggttataagcttttatatgcacgcacatacacaaacacatacacacatatatacatatgtgtgtgtgtgtgtgtgtgtgtgtgtgttttctttcagtacggtccctattctgatgtctcagaaattaccactgctgcggggccccctggacagtgcaaagcaccttgtatttcttgtatgcctgatggatgtgtcttagtgagttgggaggtaagtcaggcacattctgcatcaacttctgtttcttctactttatctacccccaaatacaaatacaaattataaggaagctgcaaattcaaaatgcacatatagatgattttttatttatttatttatttatttttttttttgctctgtatactatagtaatcacccttagcacttgccacttgcttatgttatttagagttgtggaaattttaccatagtcaaaattgagaggaaatgatttctcatgcctttcttttaaaacaatttttattttattttatttatttatttttagttttctgtgacggagtttcactcttgtcacccaggctggagtgcagtggtgcaatctcggctcactgcaacatccgcctcctgggttcaagtgattttcctgcctcagactcctgagtagctgggattacgagtgcccgccaccacgcctggctagtttttgtatttttagtagagacagggtttcaccatgttggtcaggctggtctcaaactccttaccttaggcaatccacccacctcagcctcccaaagtgctgggattacaggcgtgagccaccgcatctggccctattttaaatttaaatttctaaaccttaaaaaaaattttatgggtacgtagtaggtgtatatatttgtgatcatgcctttcttttatatgtgttttaaatattctgaggcatgttgctctctttcccattttagttacttgaatacaagcacagtaggattctcttctcagtggcagcattaactacttcaatttctgcctttccagagtcctgatagttctggtgctgacatctcagagtacaggttggaatggggagaagatgaagaatccttagaactcatttatcatgggacagacacccgttttgaaataagagacctgttgcctgctgcacaatattgctgtagactacaggtaggttgacattattctgatgttactcacaaggactggttttcccatgaaagacactttgggaaacccactcaaaggcttgtggtggaggctgtcaggagggatgatatggaaaaaaagagtctgtttaaataaaaatacatttggttgttttggtattttgcagttaatttccacttctctaggaaattctgaaacttaagaacaaaataagtttcttctccattctgcttctcaccacccttgtatcttgtctgttcatcagtttgctgaataaatgacccaagtccaagggaaagatgacacagctccttagggaaggagccttctgtctcattcccctgagatgcacatttcagtgggaaagactcttagagctggcaaaagacagaaaattattttacgagctgttaaatggagccaaaaataatttggactagtctgcattagattacaggaccccacctcccagtgacacttatcaaggctggttatctataagcttccacttgggagtccagataaaataacatcaagaaaaattggttcatagcctaaacccccagagtggcaacaaccatgggtttacttttattttactcacttggctatattattattctttctatgtaaagccctagtctcttgagaaaatagagttatttgtcctcctctttccatctgttcagtaacatttcttgagcattatagtactttgtaccaggatcaaaggaagatcaggaagagagatacaaagattaatgagatgtggttattgaccttgaagagctctgtcttcatacacatttagatttgaatagataaagaagcagagatgccaaagtcaacttcccacctgatttaagtcatggatcaaattccttattacaagtacacccagtgtctctggtctctttggagaaaatatttgcttcataacttaatttttcagagcaactgaagcatttctgttaaattctgaagtctactttatttgaaacatttctgattaaactcttttgttatacacctttcttgcttctcgaatgaagcacctgggacataattaaccttttgacaatgagtcagtgtcacagcaaattgtctgatctttataatagtgatgctgagtcactggggaaaggttaaattatgtgccacactcctgtttttctatcaaggcaggatataaataaagagctgtctgccaccccagtaaagaacttcactccattatggtttttgagttttgatgtttctttaaaatgttattatagttccttttttttctctttcacagtatatgttgtcttagcattgacttctcaaagctacattataaaagatacattaataagaatagaacctgcataataatcttgcctccctgtattaacaggagtagaaatatattttcaaatgtctgtacttatttataataaaatgactcagatcttatgaagggagtactacttttaaaattaccattgccatgctaaaggactattgccaggaaaaggatctgttcaacctgtatcgatttattgttatttgtggaccaaatatgaactattttcattcaacatgattacaaagtcaagttaaatgccaatagtttttgaatatttggcaacttaaaaatgtaaatatcggccgggcatggtggctcacacttgtaatcccagcactgtaggaggctgaggccaactgattgcttgagccaggagttcgagaccagcctggacaatatggcaaaactcctcctctacaaaaacaaatacaaaaattagccaggcacctgtagtcccagctgctcaggagcctgaggcaggaggatcacttgagccaggtcaaggctgtagtgacctgtgaccgcaccactgtacgccagcctggcgacagagtgagagcctgtctcaaaaaaataaaataatataaaaatgtattataatacctatactgtgttttatagaaatttggtggaacatttcttgttttgctcaggaattttggaatttttatattctcaggactgttttaattaaatgctggcgtaattccattcatagagcatgttgtatattataggcatactattatttataaaaagttgattttgaattaaatttcattttaaaactgttaataaaaagtggtataaatcaaatgttttctatagacccaggctagttaaaagaaggtaggatcctggagtagaaacagaacattagaagaattggtaagattctgattaggtctgtatgttaagagtatagtaccagtgataatttttttcttttttttttttttgagacagagtcttgctctgtcacccaggctagagtgtagtggcgctatcttggctcactgcaacctccacctcgcgggttcaagcgattctcctgcctcagcgtcctcagtaaccaggattacagatgcctgccaccacacctggctaattttttgtgtgtttagtagagatagggtttcaccaggttggtcaggctggtctcgcactcctgacttcagctgatccactgccttggcctcacaaagtgctgggattataggcgtgagccaccatgcccggccaccagtgataatttcctggatttgatcattaatctgtagttctgtaacatgttggtcttcggaaaagcagagtgagagatagacagaaatttctctgtactatttttgcaacttttctgtaagtattaaaatagtacccaataaaaaggtgtttgaaaaaatagagaaaatactattttgttcataattttcccagtgggaaggaaggaagtgtagctcctactgctggcctgatactctgccaagattttacatattaacctgttgaatctttacagtaattctatgaagtagacattactgtccccattttacagctgaggaaacaagctcagagaaattaacttacctaagatcacacagttgttaaatgatggaatcaaggtttgaactaagctccaactcttaaaagccatattcttgtccttctgtgatatggcgataccaaaccctagttgatacagacattgggctccatgatatcctatttttctgcctctgtgatacatttatatcagtaccaaaatctcaaaatatatactcataaaataatttgtgatgttaaaatttttccaaaaagagttaaggtgttgaggtattgtaatgaaacagaaatggatatgacaaaatattacagtagagtttcaactgtgatttaatagcaaataaatgctttaagcctgcttctttgaaattaatgaaggagttataagctttgttttagaccttgatttaagagctcaaacttagccgggtgtgctggtgtgtgcctgtggttccagctactcaggaggctaaggtgggaggatcgcttgagcctagcaagcagaggttgcagtgagctaagattgtgccactgcactccagacagagacagaccctgtctcaaaaaaaaaaaaaaaaaaaaaaaaacctcaaactcctttagttttttaatttgacctcataagctgtccagtacactaaatgaaaactaagttttagagtacattcacttttgtaagaaagctaccaaatgtttttctctttataagaaagaaaatctttttgataacatttattgaacacatactctgtatcaagtacagttgccagaaataatacaacagtgagccagacaggcaactttgcccttatgtaacttgcattctaatcagaggagtactatatactatgtcagtgataagtgtcatgatgtaaagtacaacaaagaagggaaataggaaatgtgaaagaccacaggggaaggattgcaagttgaaatgtgttcagagagggctcgctgaacaggtgacacctacagaccttctctcaaatgaaggtgattgagcgagctgtgcagatgtctagagaaaaagctttctgaacaggaggagcagccaagtgcaaaggctgtgaggaggcagcaaacttggtgtccctgtggagcagcggggaagacagtgtagctggagcagagtcagtaaaggggagagtagcaggcaatgaagtcacagtgctaatgggtttttgaaggggattggtagtgaacagcagatcatatagggttctgtagggtttcataagaacttcaaagtttattctgaataagatggaagcccactgaaggaatttgaaccaaaagtcccaattcatattttcactgaatcactctgatagctgtgaatatagattattgggcaaggaccgacatagataccagctaggaggtcattagaataaccagataggagagagtgtggttggactagagtaatacaggatatgctgatggcctggagaggggcatgagagggagaggaagaaaggtgtccagggatgactgagttatgacttgagtgctctgaaggatgagggaaacctcaggagatgcagtcaggtttttgtaaggagagatgggatggggatgaggagctgtgtggacatttgagtttgagaggcctgttggacatgcaagtggagatactcagtggttgaatacagataccctagaccagtattcagagcaggagtgtgggctgcacatccaaatttgggagtaggttatcagtggtgtttacgccttgagacaagatgacatctctaaaagttttagtagaggtagaaaagaggaggtagccaagtaccaagcgctgatactcaccagtgttaagagattagggtgatggtagcaagcagcaatggtgattgagaggcagcagcagcaagtaaggtaggaggagaggtaagtgtggcatcttggagacctagtgatgaataagcatttgaaagatctgggagtgattaggtatcagctcttgctcttgggtaaagtcagatgagtgctaaggattgacttcagggatgagtttattattcatgtggaagatagaagatgcctcttcctattgctattccaggacagctctagacttaaaagccagatgaactggattctggtcccagctttgcctctaaatctgaggcctaagttatctaatctgactctgagttcccgtctctgtaaaaggcagataagaatacctaccatttaagatctaccatagtgggttattatgaagatcatgtaagatgatgtataaactgaaataggtcatgcaaatataaaatattatttttaaattatttttcataagaaatgatggtggccatattttgctttaataatggaaaaaatgtggttggcatgttttggaaggtggtcatcagacagtagacattttctaggatttatttctacctgcatgtctggaaatgtgtactactttagatttatttaatggcagctaactcagaggcatcaaaacgtgctaatggtgtaatatggccttcgtcttgctgttctgttttgtaggccttcaatcaagcagggccagggccatacagtgaacttgtcctttgccagacaccagcgtctgcccctgaccccgtctccactctctgtgtcctggaggaggagcccctcgatgcctaccctgattcaccttctgcgtgccttgtactgaactgggaagagccgtgcaataacggatctgaaatccttggttacaacattgatctaggagacactagcattaccgtgggcaacaccaccacgcatgttatgaaagatctccttccagaaaccacctaccggtgagtgcaggggagtagaaatctgcatcaacacatcagcacttggggctctaagtaaactgctgggggaaaatgaccagtgaatgtcatctcctagctgtttctaagagcccagatgtccagggtcttgtctcaccttgatccctcaggccagaagacctgtgaaaaagccacacgggtgcagggactcactggacagttttgtgtccactctgacccacacctgtctctaccccagagtggactcaaatcctcaagtcagtcctctgaacactcaagtcagaaattataaaaggtctttggcaatacgttagcccaagaatttggcttcttccagacattgtgccgaccttaacggtggcttaaatgatgataaaacttttaagatttctaaaaggatggcattagagatatgttgacttttattaaacaacctatggttgtttaatgactaataaaaaaatatctagagctcaagggttcaactgagggaacacatgttgagaatcattgtttactaaggaaatgccaggtaaccgctgaaattatcaaaaatatcttccacataccagaaagcacctcagaggatagttctgttatggagaagatgaaatggtttagtagtgtaggaactatggaaaggtgagcttagatttggatagtaaaacctcaagaccctatttaaaaagtgtttaatgaatgcaccataaataatttaattcagtattattatgccaaggctagtacattgagctgaatgtgaaaagaaactcacattgggagaatgccaccttttccttataagatagctttgaagataccattttagacagatggcaatttaatagctttagaaaaggcaaatgtttggtcctagtcatacagttgatcttggcaaaaaaaacaaaaaacaaaaaaaaactttagactgtctttgctggccaatcaataaattataaattggacattacatacttgaggtaaaaacaattcatacttgctttttcttttacatcttgaagtagaggctgatttttcaaaataatagcctaccaaatgaatgaaaatcaatcgaaaccttttatgttcaatatcattctatagtagtttgttttatttctgattaacatgtaggacaattttacatacccatttctgtttatatacaaatagacaaaaaatttcaaatatgaattattatcgtatttaaattctttctagttttaatccattgttcacttaatctgaattacattttgtgagtcagtatttatcatttaataatagtatattttatattttatatcatgaaatcataaactaaatattagggaccaagttcaattaatatttttacttgctaatgtttataactaagatattggtgtgcccatatcagcaaatgagtattttttcaataaaaaaatataaacaataaaaaaataataattcatacttaagaccaaccggtttacagctttaggaattttagtttctatagcacacagttgggtatactatatagtattaatagaactatgttcaaaccacagtcttgttgttttatgtttcaaaaacataattgcaataattatagtgaaatacagaatgagtatttcaaggaaccaaaggtataattttggcccaatcaacttttacttcaccttttttctgtcctataaattggttaaaatataagtgaacagatcatgatgttctagataaaaacatgtggaatgaaacattttaagcagaccatggagcttggataaaagacttgtttcttttgtttgattttcttttttttcttttctttttttttttttaaagccttcagcagttacatattattctcataccaagcttattctttctctgtgttgccaggacggggttgtacacctctctagtaaatgtcctaatgcgaaaaagctttttcaatggattggtcatttctccatgggtgctattaaagcaaactacccattggcttgctgacacactctgtagaaatttcaattctgtaggaattacaatgctacttttaaaggcattcctttaagtttataattgagtttgaaattgaatttgtcctttagtttgaaggaaaacagtattattaaaaatgaaaacctaactttgctttgtatgcttccagccaagtagtcatagatttggcaagataagagggtcatcggatcacctggtatcactccttcccagtccttctatggcttgagcatcttcagtgacaggagcagtggttctagcttccactcaccaggcagtccattctatttgtggataaacctctctgtatctgaatctatttgtggatcaacctctctatatctgtatctatatctaaaatcaactgctggccttagaacttcctcaacaacagtgattttcgaagtgtggtccctggaccagtagcattagcatcatctgggaactcgataaatgcaaattatcaggctccaccccaaacctacttaattagaaaatctaggggtggggcgtagtactttgtgctttaattggcctttcagaagattttgatgcttatgaaaacttgaaaagctcggccctagagcagcgattcttaaatgtcaatgtatataagagttgcctggagaaccttttcaaaatacaggtgtctgagccctactcctgtagaccgcagttggccccacagggggcctaaacatcattatgttctaatgacagctgtctcttatttaaccatcccactatcatttacagtgtcttcactagcataggttttctataactgcctccctcctctttgagtgtttttaggtttttggtgacctctctgacgtgcagtgcccgtacctccaggaatggtctggttgactggctcagagcagaccaggactgttgccttccttgttctccgtactgagcagttagtgagattgcctgagattactttttttaaacaaccttattatatgcctgactcatactgagctggcaggcaaccaaaacttaaagtagatttgtttgttatgctcatttgtactccttttgctaagtacaaaaggcttaaaaataacatgtattgagcccttactatatggtaagcactatgttaggctgccaagaagtgaatcataaatcattttgtcgtaacaaggtgaggtgggctttactaggagacaagttctgagtagttcagtggtagcagactggagtcagacagcctagacttcaatcctatcccttatttattgtgtctgcaaactttaggaagttacttaagctctctgtgcctcagtttcctgaccaataaaaaggggataataattttcactacttaacagagttgttaggtattgtagataagaggtcaggtacctagtatggggcctgacacttagtaaataaattatcagaaaatctgttgttaatgtttggtaggaaagaaatgaaccgaaagatgggtcgtaaccagattataggtagagatcttatctgtagaaacctggcattatccctcaaggtttttttgcctccagagcagggtatgagaagagcaagtctcagtgcctggagctggaatggtggcattggtgtcaaaggagctttcaggagcagcagcttggtgagaggccagttccgactcccctctccaggaagccttctctgaataactttactctgagcccatcttttccccaccaaaagggattttctgtgtttgctattatttcgtacttcagatgttttctgatgatgattctcttctttcatatttttcttcattagatgatagtccagggcagggctgttgtaaaagccagcccatcttgtgcttctcaggcctctcctaccctagtcccttcggctgcgggccctctcagtctccttcacacccacactctcaacatgctgagttctgggatggccagtcctgatgagggaagtcttcccagctaaggatggtttgttttgaaagtcattcttcttttaatatattttgtagtagaaatttgattatgtatataaagtgcattgcagaaggctatgatcttctaaagcatgagtgtatttggcatataaaatttgatcctttaatagtggatttttaatcaaaatttataaagaatgtggttctttatttgatttgtttaatcaataatattagtatattgatgaatattgcagactcccggaaacatgaagagatttttcacatcagcctggccaagatagaatttgcttggggttacatcacttctccaaattggaaaggaaaatgctacttcccttgtacttaatttgcagagctgaagattttttaaacagacataatgcaaattaaacaaaacagagacctgcagattttatctaggtttcaagattagcatgttacttgaactaaagagaaaacttctcaagtttgggttttggatagactctaattaatgtaataaaacttaaaattcaatttttattttctgaggtgaattcttggagtggttcctcaggttagtggtttgcccattagtccaatgtcacctctcactgaattaggaaattattttcacatactgtgtttttcaccctaaaccaaaacaaacagcaactgcctcagtcctcattcagctgtctcagcctcccatgctcagaggccttatattttcctcataatgcaacatcatttcattctattttatcagttcctcaattgttttccattttaaatgttacatcatcattagaaacaattaaagttagctcagtgcatcagctatacacgtaaatgttcatgtatttttgctgaaacaaaatgtgtttttgtcaaaatgtaggataggttgaattgagcattttaaaatctagatagttgatttcatggccagatgctgcttgaataaagtgaagtaaacttgttgactcttctaaatgcctgcttccttggcagacggtcattgttgaactgaaagtgtggtttgaattaaacatgatcatttggtgggattggtagccatatttggtccctgttacgatatgaccgtatggtatgccagacacacagggcctttgcacctaaagggagtcctgttcacgcctggatctaacgtgtgtctgacacgaccgctgagctgcagtttcttcacttgtaaaacagacaaagtagctcctaccttatggggtcagcatagaaatcagagatgatattgtagatgtcaaacctagctttcaacccctagtggccactctgtcatttagatcaagttatttaacctctctgcatttaactttggtttcctcatctctaaaagcagatgtaatagtacttcccactctagtgcattttctggaacagggcaagttctcaatgtgtgtagtgatggttgccattgttgttttcttcaattgctgagatctttgtctcactctcacctggctgtggatggcttataaagaagcccatcctttcagctgttggtgagtccttggccattccttggaggaagtgggatcagcaggttactcatgttataaagtgaggtggtgtaatagtgcagccgcagtgagacctgcccctgtgccagcacttttggcaagacgtagcactcccaaagaagtcatcaagatcatgactccaaaaatgaacacttgaaagtttgctagtgcttttggctgtcttgaatcctctcctgattttattgtagagtataaagtattaaaaattagaaaatacataaatcccttatcttagttaagtaatcttctttgcaattgcagaaaaaagtcactgtccccatttgatagataaggaaactgttacataaaagtgttcaataatttctccaaggtctccaaattgatgagcaggattcccagagaagctacactgctaaagagtgttaaatgctaccacagttttcttggtggtggtggtggtggtggtggtgtgtgttaaagctaagattatatgcctaggaaatatacgcagtgaaagattggaaaaccatagagctaaagatataaagaacctagtacttaccaaaatactagggaggctttgaggaagtaaatgaatttacaacagaaatcaaataccaaatctaaatttatttttgtatcttaatacttgtatcttctaaactatttttaaattcttataagtgatttaaatctcttagcaatttttttcttgaatagaatagaacaacaatcttaaggaactcattaccttattttcttttgtgtattaaagtagctaagagctattcagtggcacagagcaaagggtaggatcccctagaatgcaaggtaagccagcagatggcagaaaggatattggcctctggaatctgggaatgtttgtacctagaataaagggaaggaatggtggtttggacactggaaggaccttaatataaaccttgtaggtgaggaaatgtgttacactgttgaagaaagactaaaacttaatgtccggcttaatttccttttcctgagaaggggaagagggtagtaatttctaccatcatgatgactgcctttttaaaaagatttttcatttccagttgcagaaaaatatgttacattccaatcatagaaagaaactcttctattaataccataaagcaatcttataagactcatgtgggaggcaaggaagagttttagtcgttcagtgttataccgagagacttacattgctttatctacagaagactcgatgcaaccccagtgtaatagaatctgggaaaaataaggccctttgtgatggagtttttgctctactttatcagagatgagtatttactacattccaaacgatgaggcagatctttatctagttttaggtgattataagtagagctgctgtaaacatttgtgtgcaggtttttgtgtgaacataaatattaatttttctagagtaaatacctaggattgggattgctgggtcatgtaataagtatatatttaaaaggaaaccattctcctatgtggccatgtcagttttcattatcactagcaaaataggagagttccagttgtaccttatccctgccagcacttttttaacataatggtattacattgccaatttagtttgcatttttctaatggctaatgatgtcaaacatgtccttatttgccatctgtatttcctctttggtagagtgtctattccagtcttccgcccatttttaatggattatttccttaaccgagttttgggaggtcattatacattctggatacaaatcatttgtcagatgtaatgttggcacatattttcttccagtatctatttgttttcattctcttagcagtgcaaaaatttcaaattttgatgaaatccagttttttttttttttcttttatgtaagatcatgcttttcatgtcatatccaaaaactctttacttaattctaggtagtaggttttcttctgtgttttcttcttaaaagtttaatattctacatttagatctgtggtcccttttgagctaagttttgtgtaaggtgtgaggttgaagctgaggtttattttcttcctactgatatccaattattccaccaccatctgttgaaaagactgtcttttctccattggattgcttttgcatctttgtcaaaagttgattggccacgtttgtgtaggtctatttctggagtctctattctcttgtattgatctaggtgtttttcttttcactggtactacactctcctgattactgtagctttatactaagtcctaaaatcaggtagtgtgattcttcaaactttattcttatttttagactttgcattagctattttagttcctttgcctttccacatcacttttttttttaatgtataaagaaaagagattggtttggctcataataaactgtaggctgtacaaaacctttggttctgtaggctgtacaaaaagtgtggtgtcagcctatgcttctaatgaggcctcaataaacctttaattattcggtcttcctaggcctctggaggagaggggctgtgtctccaagatttctgaaatgcctttaagggctttttcccattatcttgaatgttagtaccaggctcccttttaatcatgctaatctctctagcaagtggttgctctacagactgcgttgattcttctcctgaaagtactctttccttctctaccacatggccaggctgcaaattttgcaaattgttactctttgcttcccttataattgtaagttccaactttaagtcattcgtttgctcccatatctgatcacaggttgttagaagcagccaggtcacctctggaacactttactcctagaaatttcttttgtcagataccctaagttatcactctaccaaagaggaagttcagccttccacaaagccctaggacatggaaacaatgcagcgaagttcattgctccagttcccaaaagttcctcatttccatctgagacctccgcagcatggccttcactgcccatatttccatcagcactttggtcataaccacttaatcagtgtctaagaagttccagactttcctgtcttcttctgagctctccagactcttccagtgtctgcccattacccacttccaaagtcaattccacattttcaggtatctttatagcaaccctctactcctcagtaccaatttgctttgagttcattttgtgttgctcaaacaattctcccaccacaacctcccaagtactggggccacaggcatgtgctgctatgcccactaaatttatttttttgtagagatggagtctcactaggtggcccagcctggtctcaaactcctggactcaggcaatcctcctgcctcggcttctcaaagcactggaattacaggtgtgagccactgtgcctggcctaaaataacattttatatatacattttaactctttgattttaaattcatagatgataaaggtaatatctttcttattcataactctgtgctgcacatagaaaatatccagctaagatttttgcacatctggatggcatcctgttactagcaatatctgcatgcttagctctagttaaagacttgcagagattgttggatgaggctggcaaaagggagacatgaaatgtcctattgatgagttgtcctttgttttttgactttgaaggatactcatttgttccttcatttagtttactcttgatagctcacctacttccaaaactgaccatgaggtagctgaagggtaactaggacaaaatataaagcatatctttaggatatcttccctgagacaacaaacctattttttaaaaattaaagaactaagagatatcttgctaccgtgcttttttgctattattattattttttttaatggagactatagtctgtccacctagcaaccccatgcttctatttgtcttgagttactttaacttgtttttcttcattctatgttattgctttaggggcaagtaataaatactatgctcaatgtttatttcaaatgaagtattgctgctgctttaacctgcattgtctgtattttttttttcctttctctaggatcagaattcaggctataaatgaaattggagctggaccatttagtcagttcattaaagcaaaaactcggccattaccacccttgcctcctaggctagaatgtgctgctgctggtcctcagagcctgaagctaaaatggggagacagtaactccaagacacatgctgctgacgacatggtgtacacactacagctggaggacagaaacaagaggtgaggtgggggtgaggatgctcctgaagcttctgtggctttgacttgcggggtgaaatctcaatcatacattcttatttgcttgcactaagaccctcttccttcttgttcagaggcttcctttgacttgagtcctgcgttttatacctagagttgttccctttattctccatttggattttctaaacattctaaagatcctgattttcctacataagataatatgcactttttttttccctttcatcaaaccagataatggagagaaattatctaaagaaattgtcaaattcaagttcacactatgtaatagcattatattagtcatgagtgcagagggaaataagacccaggaagagatgttacctctttaaatattcagtaaccatcaggacaaacatgtttaccaatgtgaaatagctgtgggtgatgtacagatggggattgtactctgtaactatgggcaatgcagtatcaaattaaccagagcaaataggagattcttcataagactctgtacccaggaaaccctcttggctgttcaaatcaaatgtagcctttcacatagtatttgtttaacctaacttcattttctctgaaaatggccgatcagaagacagtcagccaaactgtatttagaaataatctgatgtcaagcaaaagttaatggtgacagaatgttctgttaccaaaagtcctaatcagagaatcaggtaaaggggatgggagagcaccataaaaccaagacaaccaaaatgctgctacttacctgcttacctactgacacacaaaaccagtgtcagtatagaagcatttctgtcatttccttttatgcattatactattctgttctacacatatggaacccgttctaattacacagaaaaccctgtcccagtctccaccccctactcttcagtcaggtgctctgatggatttcagtacagtggagccctgtgggccttcagtggaaaccaagattaaaaatcacataagaccctacctctaggagcataataatcaattttaaaaatggccgtagaacgttagtgtcagaggaaaaaagtgctttgggagtttgaaggaggcagagaccatctggtttaaaagatcaggaaaggtttcttgaaagatgtgacatttgagcttgactttggaggacctggcaaacctggtaattttaatgacagaataaaaagggattatcctcttggaaattagttctagtgaagagaacacagagaagttaaggcttcctttgataggttcatgaaagattaaattcatattcattgatacacaagatcattcatcttactgtgctatatgtgccttcggatgtgttttcatgggcttattattttactggctagggactactcaatgggagagggctggcaagaacaggaattgtgaactaacagaaatcacaatacatgtataaaactagcattgggggaaatttttaagtgtcttttcatttttcccaggcctgtgtcttccattggtggtaaatccttagaaaatagcttctagttgtgctgttttagaaaaaagggaagcacagcaaagttgttgaaactggtagctagccgaatagggataaaggccaatgccttccaattccccgtgccctgcctccactgctgtcttagaaatatgggaagtgaagactctgccccaagaagggcaccccctcttgttgcaatcctgccctgtgtggggcagcaacccactagtgcctcatagggaaaaccatacaaacatgtaatctgatccaaggttttccatgacacggtggctcctgggcacagaacaaaagctccccaagcacttttccaaatgaggttgctggcatgaggcatttaaatatgccagacaaaaaatagtgcagaatctagtaatcaatacatgttgtttcttcccccctcaaaaagcccaaggcttgcctaatcaaataaatgacttgcctaaatttaaatggcaatttaagaaaacttcacattaggaacagtatttttcttaattataggagctagagtccaaatttatctttttaaattaaatttgtcaatgctctcagaaagttattaaagtgatgggaatatcgagcataataaattctcattctatttgtgaataattttcctgagatttaatagaatgaaaacagcctaattttagtttgaagatgaccttcgtcagtgtcttgaaactgaactcttgtagtgagtggccttttgaattcaagcctttaactttgaatcttggcacacggatatcaaggagaaacaatttgagttggatacatcataatgcttattattagcatagcctttgtcaatctagtctcctcaaggttctttaggacctggcttctgcagttgaaaagaacagtgtcttcctcccaaggggtagctgtctttttcattgagcttgttgctagaggagcttctagttgtaaagcacatattctttagcatatgtgttaatttcattaaccaccagtaagttcgtcttatgcacgtggccagaataatgatatatccagcttgtggccaaggcgagaaccatagataggcttcattgttattctacttcacttttttacctgcgggctctcaaagagatttttttcctcttaagtttgagcatatttcttgtaaataaaagggatcccaaagagcatcttgtgcgaacccttggcttaagacaactcaacctaaaattcatctagatcacctggactttctatgttgaaaggatttttccccccggaatgggacatttgtttcccatctattcgggcttacgatactgaagagtcctagtccatatttatgagggaagcagcctgaaagtgttaccatgaacactttataaacaggcattgtgggcctttgaaaagaaagctgctgatgtctgagttgtgtgggagtcctaaccagctgtttaagtgttcttcttaagtatattttgtaacagaagaaaaatgaaaattaatatatctgtgcttcataattatcatgttaaagaattgagtcaattttagcaactattgctaaacttccttattcattaaataaaggggttaaactagaagacgatctctgatatcctttcaccttttcaccttaaagcaacaaatctttgtagagtatttgtgagttaagtcccttgtaaatgattgggacgtgttgcctcttttcctttatatttttagcctctgctattcataagtaagaaaataagaaaaatactaacttcccttaagagtaactacttaatgtcccaaaacccctcaggttctgcaactatgatgcactgatttatgatgtttatttctatgcctctcactcagaaaatttgaagtgaccaagagatttacaaatgcaatgttcagccaaaaatgtttttaaccttctaaaggatagttatatttttatcattgttattttgttattgttgttgtttttacagcctccctcccaggaaacttctatttattgcatgcctacagagcgctaagtgttgagagctctgcctacattatttagttcttgaataaaaagggaaatattttctagaaagtagggtttgtggccgggcgcggtggctcaagcctgtaatcccagcactttgggaggccgaggcgggtggatcacgaggtcaggagatcgagactatcctggctaacatggtgaaaccccgtctctactaaaaatacaaaaaactagccgggcgtggtggcgggcacctgtagtcccagctactgggaggctgaggtgggagaatggcgtgaatccgggaggcggaccttgcagtgagccgagatcacgccactgcactccagcctgggagacacagcgagactccgtctcaaaaaaaaaaaaaaaaagaaagtagggtttgtacaaaagccttctgccatttaggtgaaaaaaaatacattgataagttgatttgatttcaacttacaattattggatttttatacatcaaatagaggcactgcttaagtattagatggacaaagatgactaagatagatcccttaaggagctcacagtctggtgggtgatggtaggacacagatgctttaaagcaaattatgatgtggaaggcctaaagattgacacgtgcacagggcattagagggaaaattgaagaatggcatctaaggtaggcttaaaatcaaatgaacacttcttagaaaagatgataggttgagtgagtcttaaaaggatgctaatcttgtaacctgatgtctggggagctttgggaaggagactagtgatgaagacttgggataggatgaaattacagacaaaacctccaaagtacagaaaggtaccctgagtctttctccaggtaactgtctttatttggttattttcagacctggtgctttctttcccgttaagtttgggcatgtttcatgtaaataaaggagatcccaaagagcatcttgcccaaacccttggctcaaggcaaatcaacctagaattcatctagatcacctggacttgctatgttgaaaggattctacccccggggataggacatttgtttcccatttattctggcttatgatactgaagattcccagtccatatttatgcaggaagcagccttaaagcagtgcttcatatttatggaactaagttcatttcattgataagattatgatcattcaatcatcgattttttttttttttcttgaattgctactatgtgctgggccttatgaggtatgtggactatctatgagagcttatcttgctgagggagataaattaacattaaacaataagcagacagtaaaagagacagcagacagcaaaacaaaaattaaattagtttggccttagagtgattaagtctattattcttaacagatccagcacagaagatatgaatgtctttggttcccgtgttatacaagaaaaatatatctccaaagtaaacatttccataaagctgcattaacctcatacaggcactagaataacaggatcagcttgtgcgttttaagattgtagcactgtgccgatgactttgaagatgcgtttatctgtgttaaatgaaatgttatgctgccctaacagaattggagttgatgctgctccctgtcctgacccttgtgggtctatgttccccgataattgtatacagcactgaggcaggaagaacgtaaattccaggaatgcatttatggttaatctgttgttgaggtttagtcagacagccagtgttttttaaaccaaggctccatgaaattgggctggaggaagagggatctaatagagcagataattaccacttgctctccattaactcagccattgtgcccaggacacttttccttttggccagcaaaattggagaggctttgtcatgtttacagggagcctgcctgttggctattagagagggacagaaagaatctgatatagaaaccctaaaagaatacacactaggcaagtaataaaagtggccgggaacctgagcagcatagtgagaccctttctctaaaacaatttttaaaaacttagccaggcatggaggcacacactgggtcccagctactccggaggctgaagtgggaggatcccttgaactcaggagtttgaggttgcagtgagctgtgatcgcaccgttacactccagctcgggcaacagagtgagacccagactctttaaaaaacaaacaaaaaaaaagtctggagtatatgggcactgagaaggtgtgagctttctcagtgtatgcctattatagaacaaactcctgcttatatttctcagaccatgttgctgaattaaatgaaatagatgtgaggcagccagctcagggctggacctttaagaaaccctcaggatttgtttccagtgcttctctgactagtccccgatccatatgatcatctttatttgataaatgacattttcatattacatccatcagaaggctatcatgattctcgacatgggtgtcaaatctcttaaaatcccagatctgttgctggatttctaggtgactagaggcatatcccttcacttctttttgccttaatttcccctcctacaaaatgcaaataatgatagctgtcttcagtccttaactgatggagaaaaaaagatttagaaacgtttttggctggatgtggtagctcatgcctgtaatcccaacactttgggaggccgaggcagatgggtcacctgaggttaggagttcaagaccagcctggccaacatggtgaaaccccatctctactaaaaatacaaaaattagccaggcatggtggcagatgcctataatcccagctacttgggagcctgaggcaggagaattgcctgaacctgggaggcagaggttgcagtgagccgagatcgcgccactgcactccagcctgggcgacagagcaagactccatctaaaaaaaaaaaaaaggacattttttatttattagaaaaggagcattttatctcttagaagttttatctcttagaaaaacagtttagcctttgaaacagagtagcttagtcaatcttaggctaaaatgtccaggcacagacagaggtgagaggtggcagatgaactatttgagatcttaactggaccggaaatagaagtcagattgcagttttacctctcatttactaaaaacaaaaataacagaatggaattagatagcattttttttcaggttgagacaaggtcactaaaacattagtaggcaagtagaaatttagaaaactctgggaatagcatccttgaagatttcactgcatacacttgaaagcagagtaggagagtgggagaatgcaaacttttcaggtggtctttagaaattctagtcatccttttttcaaatataaataaatctccattttaatatattaatgcctaaagtatacaaaaaaaaaagatttttttttgttttattcctttattctttgtaaagaatttccaccatcagtaggtattagtgaaattttatctcttagaaaaggagcataaaaatattccactcattaatgaaacagtattacagcctgatcactcaccagccaaaaaaggtccatatacagccagggacagagggttaggaaattaacctcttttctcaatagctgttggcacgttcatgctcagttggtaaaaggggactcttgccaacatcaaaatcagtttaggtattgcaccttccctgcctcaggttccccacatgatgccatctgcttctccatagacatggtcagactccatgttcttggcagagtgagggcgaatactatccatttctattttgagcaccattcgttcccaaatgccacctgagtaacatacggaattctctatctcttcctctctctctcattcatacacatacacacaatccatggagcccagggaaattaagaaaaaaaaaaagacatgtcatttttaatgaatattgctgagctgttgagttttgatattgtgaaacatgttttgaaaggtaccatttgcagcctttagtggactacaggttattttaggtcagcaggttagagcattttgagaagttaatgttaatgggttgctgtgagcctgtagttggcctagggattataagataacaaggtagtaaacgtggaaacgttagcattatctcttattttccaccatgaatttaagttataggccagttagagcattcttggatgtttttttcaaaaggaaactgttttaaggaaacattctaaatctaaattcttcatgtatattatatatccccctatagtgatttaaaataaaggaacatttaaagatttaacatgatggaacttcttccttcagttgcacttgagtgcaagaagtcaactttcacaatgttaaagcctaaaatattgaaattaaaagtatagccttcccctggaatttctggaaaatgcccagaatctgttgtttgcctttctagtgcatattcaataaggagtcataggatttacttcgatctcataaaagttcctgccaaccgaacaagacagctgttttctggcagttgagctgcagagagttatgtgactcgttcaagtttacagtgacggtaatagtctctgcattctggctaagatctgtgtatatctttttgctcttgaaaccttgctctgtcccgccatggagtactctcactggcaagcagaataaaataagcaaagtcattcggtattcacagacacataaaactttgtttttcatttttaaatgtcttttttttttttgagcagttttaggttcacagcaaaattaagctgaagggacaaagatatcccttatcccacctaccctgacacatgcacagccttttctattatcagcatcgtccaccacagtgggatgtttgtacatttgttacagctgatgaacagacattggcacatcattattacccaaattccataatttacattatggtttactcttggtgttgttcactgtatgaatttggacaaatgtatgatgatgtgtttccaccattatggtatcacatatagtggtttcctcagtatctatgggtgattggtttcagggcaacaccctcccaccccgcccccccccacaaatccgtggaagctccagtcccttatataaaatggcatagtatttgcatataacctacgcacatgctcccatatacattaaatcatctctagtttacttacgatacctaattaatgacattgctatgtaaataattgttatactgtattgtttagggaataacaagaacaaaaaaggcagaacatgttcagtatagatgcaaacatcatttttcccccattattttctatctgcagttggttgatccacagatatggaacctagggatatggagggccgactgtgcagaatgtttttttaatcattggtaaatcaccaacattaaaactcatgtgtgcttattgccatctaagtgtcttgtttcaagaaggtattacagtccaagctgaaacaagttatgggcagagccatcaagaattcatttagactgtaaacttttaatgacccacccaaccttctaaccagtttgtttcccctttccaagtaaatattcttagtgtaggatagcatttctccccatctttcttctctctaagtaaaaatgcccgacgctatgggcagtgcctagattgggcacattgccccgtcttggtgttttcagcaacagttcttagcctggacttgccaggacaggctgatgttggtcacatgcccaactcttctctccaactcaagaaaacctcatggaatgaaagtgagagggatgccattctgaggactccttcagcttttccaaccttgtaaaacaaactcgtgagcattggtgctttgttaataatattcgtgttagaaacaataatatttacatagtattaaaaaccgtggtatttatggaacatttaataagtgctaggcattgtctaatgggttttccttcatcatcccttttaattctctcaataatgctacagggtagttactcttatcgtaccaactttacagaggaggaaacaacttacctgattatagaacgcaccattaccagactgttgaacctgaactcagacccaggccagcttactgcagaacttctattatcacccactttgttatatccgaaccccctgcacagttgagccccacaggtgttactgtgcttgtcctcttcttggtcctcacaggagcctgggtcatgggactgatgcctctgcagcttcataggcacaggcagcaggggatggaggtagagtagaagatccctcagaggtattgccagggtgggctggggctcctgtggtaccataaggggtgcctgtagctacatatgcctcagcctgaactcatactaaaatgactcagtgactttattgagcatgtagtatgttccaggaaccactatatgtacattattccttgttgcttttgtcagcaagagtgctcatgtcatgaaaataacaaagtgaacattttatttgtattccttggccaccaaattagatgagtgatttatgttggggagagctaaatgtctggcatgggctgcaacagaacatcacaaatttagattgacatgttcctgctgggtcaaaagctgtgaatgaccccagtaacctgggagaggcctatatagcaggaactgggagccagaggtcctcagggtacaattcagatccccaaaaggtgacctgtggccttcgtggtgcagagtttggggccgttgaataatgccatatgccaggctcttactgtgtcctgggctcagtgctaaggttttagccacataaatattgcattgactcttaaaacaatctacgaggtagatgctatgcccattttacaaatgggaggaattgacacttagcaggggtgaatgatgtggcagtaaagcacagagctggttagagcacaggtcttcctgggtccaagtccctgtgctccacctcctccacccacagtgtcggagttacagagcgggtgaaggatggtccagtttttctcagcagcctagagcaggggagcagcccagggttaagcaggtgtgactcttcgtgaagtgcatccctgtttcctgagccccacttgctgtcagaaaccaaggtattgagggcttagtgagagtttttcaccatttcctgttgctttaggtcctcctgtttccagttgatttcttcctattccagggatctcctcccttccccagggtcagagcaatacacactgaagtattaatagtagtgatcagcgccttcaagacagcaggaccctcctgttgccttctggccatggtgtgatgtcccagggcctgtggtgcataagcaggtggaatctaagcactgaccctggtcattctaaatataaggggaagagagaggactaggaaatctggacagatgccattctcctcttcatggcaaagccttgctcttcggaatccttatctgcatttaaaatgtgtggtcttcaatcattgtgtcttgggatgcttggtatgtttaattctatcacaaaaggcctctggcttacttattaatgaatgttgaaattaagttggtcttttaaaaaagatacaggagcaagaaaaaaattaacttagtcttcgtaaaacaaatatttgatgaatatttgtaatctctccctaagtggttctagccacaggggtgttaacctgcagagcttcctagaaagagcaccatgcaaacggccataaatcattggccctgaagaaagaagattctctcttcttctgcctcctggaatgatgggaaataattacagaattgggatgaaagaggaattatattattcttgtgtcggcatatgtgctttttattatgttttgataggtctttattgtctgatactggaggagcaaggggaaccagacattactgtcagcatgtacatttcatgctagggtttaccagaaagaaatttaggatcgacagttatctgaggcctgctgtgtcagagcttggggcttttatgtgagctatcaaattcagacctcaccagtgtgttctgaggaagcgtctctgcctgtacttcactggcaggacccgcctgagggagagtaaacagcctcacaggtgtagtcccacagctcatgtctgaggccaacatagcagcctgctctgcagggttgcctcttaccatgcgactgactttccacccggaaaaaataacttctgtgttagcggacagtcatgtacatggtctctcagaacacacagggagtcctttctaaaaatcctatcttcacagcattaggatgattataactaacacatactgagttattatatatcaggattagcctaagcactttgattttatttatttatttatttatttatttatttatttattttattttgagacagagtcttgctctgtcacccaggccagagtacagtggcgatcttggctcactgcaacctctgcctcctgggttcaagtgattctcctgcctcagcctcgtgagtagcagggactacaggcacacaccatcacgcctggctaatttttgtgtttttagtagagatggggtttcaccatgctggccaggctggtctcgaaatcctgagcttgtgatccgcctgcctcagcctcccaaagtgttagaattacaggcctgagccaccacgcccggccagtacttttcttttattaacccatttaaacctcacaatatctctgaggttggttccatcatttcgctgattgtacagatgagaaaacggaggcatgaaaaggctaaactactcgctggtgtctcatagtctacagagtcaattctggtctcagaaattgcatttattgaaagcctaccaagtatccagatctttagggggtatagaagaagtttaactagaatctatttgcttgtgtatttaatgaatttttttgttgaaaagagtaaaatgacatgaaattggaaatgactgtgataaatgatttccataatataaaaaattggtaccaagtctttctcatccctttcatgccatggtttcattcttgcagttctctttctattaccttttttatttccttaagaagacaaaagggtagggaaacctttaaagtgaggaaaatgtcagctttttaataatgtgcctacttgctacctctgtctttgatgtctccctgtggctcttggtcacaattcagagtgagatgattggagaacatcttcagaaggcattagctatgatcatcttgcatcattatcattactcagcccctctgaccttgggcctgtgtgttcatcttagggcacaggcctcaaaaggacagggtacatcagtgtttctagatgacctgattgacacttgatgcttgtctgccttgggctaaagctcttaggattccttatatctcctcttcccaccttatacttgtttcacccaggagagagcctctgtcatgcctatcgtctccttccctcctgagggctcaatatctggttaaattacatgacataggaattggttaccatctattttggctatttccatacacattctgagaacaaaataaaagagctcttctccatgcccctctcatgatttcttcccatgccccgttttggggaaggcaggccagtcaaagcagtgatggctttgatcagagcaacgagcagatcatgatttattattgccagagtagacagtgggctacattagaggactgcttagacacatgcttattctagaaaaggctgaaggaagaaagaaccacccctttcccttctcttctcatctcccttctgctgggagcaccaggctgccagttcccaacttcctctccacagggaattgcagctgtaaggtggcctcctggagctgcctaactctgccttcactgaaaataaggtgactgaattttaaaggtgaaatcctctgcagtcatgtctccaccacagccttcaaggtcactcccacttttttctagacacaaatggggtcatttttgtatttctaattaacactctccagacataaataaaattttaaatttctcattactatcagctgtttccactatgtttttcatagattggaatgcagttttaaacagttaataaaatgctccagtacaagagcaaaacaagaagttaaaggacaaaatagaaacagaagattttgatgtacttgaaaattgatacgtatgttgtctgttctatttagattacaaacttagagtactgcatttgcttcagtaaatttctttgtgactgagtgctgctgcttacattgtaattgggtctgggtacaaatatacattgaacttattttccaaaaatactctccttagagtgtggcatggcaggaaagcatactgttcctaatagtccttccaaactcctttaaaaactgacctttatggcaagtttgtaatgaagatgtaacactttcacttcttaaaccatgacttcaatttgtgatataattaagggcaattactcctgttagagattgtagactgggttaggctgagctaataaatagctgtttggctctagcattagcaaggatgtcttcattagggtagtaatgtgtcaagagtgctaaataggttgccatggtatttgtgggtttcagcctggactctggctttcctgaaattaaaaatgttcagcctttaataaaaggcacttccttacacagcaaagcagacagaacactaaataagtgaaatgaccagggctcaggaacttgattgcagaggctgatgaatacagatgtggatattttaaagtaagcattgactctggcaggctttgttaaaaaaaaaaaaaaaaagaaaaaagaaaaaagaaaaggaaaaaaaaaatgttttagatctgtatgtcttcatttttccattcattcatccatccagagggactattctccagcacatggaaaagctgctgctctgcttcagaaaaccttgcccacactcaggaccagctaactcacagggattaggtcttactcatctttcaaatccacagagcctagcacacagcagatgttcaagaaatgtttgctaaatgaatacataaattctgcttacccctaggccaaattggccaaagagtcagacattttggcttatgattttgttagtggtcgacttccagtagtatctgaagacagtggattgtcctcagatgctgtgacgaagccctggaaatggagaatccgttggcctgtctgtctaggaacaaggcattgtggttggattcacttatgtagtggttctcaaagtgtccactggaccagcaggattcaaatactgaatctactaaagatcctggatgacttatgggaagttatattatttccagaattttacagttaaactatagttttaaaaaagatgacagcatactatagttctcaaatacgtttttattgtgaaaatgttgttttcaagaccttgggggaaaacacctaaaacataagaccctgtttgtttatctttgtccctgttacgcttatcgtttcgtggaaatcttaattagcagagaagtgcaaaatagtcctggatcagataggggaaggagccaaaagctgccactccaaactgtccagctcacctgtgctgtttgtctgtgattttgatgaacgtgatggatgattctgaacacagtatttttttttttctcttcacatgagttctcaacgatccatagtcctaaatgtctccttagcaattgaggaatggggctttgaaaaactcttgggaagacaagataaaagttaaaattcaaagcatttctggccaaacctcagttatttgcaaaatttggctaaagaggacatattatttcttaggtgtcccgttaacattaacttcattgcctaggaaatagtggaatattagtttatgctatcagattatagatattaccattatgaaaaattcgaaaattctgttttttattagtaaataaaaacatgagcaaataaaaacattctgatgtttctagaatctagatcctaattaaaggagtctcattccagtcttatatgtgcttaagtttatgtttttcttttataaaaacatacatttaggcattaaacttaaccctaatgtagcaactggctgattattaattcagaatatatgaaaagcatttaccaagttggcctaatctgctccagtagtttgcatcataattaatttcttgtcattaatagaagttcagatggctaattgattctgctccttcttctaggtttatttcaatctacagaggacccagccacacctacaaggtccagagactgacggaattcacatgctactccttcagaatccaggcagcaagcgaggctggggaagggcccttctcagaaacctataccttcagcacaaccaaaagtgtcccccccaccatcaaaggtgtgtagactgtgtattctttcatgctctcttgtgagagtaaggaactgttgggacttatagaaataagctcttttctgatgttaaatataatgtcagcaagatagaatcaaaagaacattctaaagaagattgagcaatgggttgtctaggggaaatgagagaccttgaaaggaaagggcctacagaaaatgacttttctctgtatgtatgcgtgtttatcaacaataatggttagaaataagggttaattcctggtgctgcagcccttaagacagtttaccaaggaaggcatcacactccctttcctagacgttcagagaagcagaggttggcattgatctttcagtgactttggtgcctagagactgacttaggcaacttcagcagcctttcccttttggcacacagctcttggtgtggagcgatgcctttggaaagctgtagcagtgatctgctgtaatctccttgggtacttatgttgaagtttgtgggtgactactttcctactctggccccttcatgggattgggtactgcagaagtcatgagagccccacatatccagatcttcccccatgtctcttgaggctagtgaacaaaagacactctgcctggaccctacttccactgggtctgctgagccttcagcctgttttctagccacagagctatgcctgactgcagctaacttgcaaggcaggaaatagcaacaggagccatagcatgctcagcctgtccacccagccactcctggactcctgaggccctgcctcatctcctgcaaatactgtggttcttgtggaggtccctgcagcttgtctttaaaggggacagacagcacaagtggctttatctagctgttgctcaaaataatcctaaggctgacagcggggtaaagtacaacctgcagaaaagatccttgcatatgtgtttgactctctactcccacatgaggaggtgtgtcagctacaaccagggcacaaagtcaattataggaactctccaggacctgggtcaaggtttggcttggattctatgaaccccatagctccttccaggattagtttagggtaaataccttgctcctgcttccctgccctgaagactctttggcagattcttctttatgtgactaagaaataagtatgaatgtgcatacacatgcatggccttgccaggtcactttggcagtaaacgccctggccctttggtgcagctttgcctttcagttatcacacaaaagatgtctgagcacactgtggctgctttggtttgttagtactgaggaagggtggctagatttatcaattatcccacttcagtggtctttctagtatgaaggagtactatctttgcctctaaagtgattcttggtggggatacattttacaaaaaatacaatggcacattgatagtgcttgcatcttccgacccttctacttcagaagggcagttttcccactctgacacatgatcaggttgtcttcctctcactcttcgattcaggaaattattgtcttagctggaggactgtttaatctgataggcttccttatttagttttttcataaaatgcttggaattttggccaagtatttccagcataggctcctttttttcttcttctttcttctttcttccttcttccttcttccttcttcctcttcctcttcctcctcctcctcctcctcctcttcttcttcttcttcttcttcttcttcttcttcttcttcttcttcttcttcttcaaagcattatttttctgaaacagtgtcacacagaattgcaagtagaaacaactctctctaaagaattagttgcatgtaattaggggttgaagtataagggggttcagacaggagatatacgttctagttacaaaataggaaaatgtcatattgaatcatagaagttatgaaaatattttttaaatctagaatattttaagtgccttactacagactaatataatttagtttaaatgagaatgaggagttcagtaggtgaaaaataaaatatatataaatataatttaatttttaaaggctttcagtgctacccattctccaggactggtctcacatgtcacctgctcctcaaactttccttagatccccacccagatatgctcttttcctcccctggaaattcccagtcttttgtttgtatctctcatttttattctctgatgtttctttttgtatgcgtctcataccttgctctccccttccttcaactaaatcttaagtttcttgaaaacagggtttaccttgcctgtttttgcatctcccagaatacctagtacagggcctaagccatagaggatactcagttgccataggagaaaaaaagatgtgatccacatcaagctgttattcatgggataatgggcaaaggatttttcattaatggctttttagtcatggagtaacttctccttgcctaaagggcaccctgatggttttatgagtggctgggtaaataaactcctctctcagggcaaacacaggcacaatcttgctctctcgtggattctcacaaatagtgctaaagtgttgactattaacatgatactttgaattttgagcttggatgtgtggatttgtatttcagcacctcgagtaacacagttagaaggaaattcatgtgaaattttatgggagacggtaccaccaatgaaaggtgaccctgttaactacattctacaggtattggttggaagagaatctgagtacaaacaggtaagaaccagtgtacatggcacatgtgcgactgagtgtggctggctccatgcctctgctcattgctatgaatgactcagtgaactatatttttcttaaaatcaatgatagaaactgcctaacttgtacttattacataattcttcagaatgtgtgaagcctagtttacatttcgtatatggtggtattcatcttcaattttcagttctcaagcatatgctcgtcttaaagagttgtaaagtgtttatttgtatttgacatcgatggtgaggtttgcatgtatcaaagtctgtatgtaattgaaaactaaagtacctgtgattttactatagaggggaagtagtctctctttttgttgttgttagtattgatctttttaaattattattatactgtaaattctggtatacatgtgtaaacatgcaggtttgttacataggtatacttgtgccatggtggtttgctgtgcccatcaacctgtcatctacattaggtatttctcctaatgctatccctcaccttgacccccaccccctgtcaggccccagtgtgagatgttcccctccctgtgcccatatgttcttgttgttcaactcccacttgtaagtgagaacatgcagtgtttggttttctgttcctgtgttagtttgccaagaataatggtttccagcttcatccatgtccctgcaaaggacatgaactaattcttttttatggctgcataatattccatggtgtatatgtgccacatttgctttatgcctaacattgatgggcatttatttggatttgttccaagtctttgctattgtgaatagtgctgcagtaaacatatgtgtgcatgtgtctttatagtagaatgatttataatcctttgggtatatacccagcaatgggattgctggtcaaatggtatttctggttctagatccttgaggaattaccacactgtcttccacaatagttaaaccaatttacacgcccaccagcagtgtaaaagtgttcctatttctccacatcctctccagcatctgtggtttcctgcctttttaatgactgccattataactggcatgagatggtatctcatagtgattttgatttgcatttctccaatgacaagtgatgatgagctttttttcatatgtttgttggccgcataaatgtcttcttttgagaagtgtctgttcatatcctttgcccactttttaatggggttgtttgttttttccttgtaaatttgtgtaaggtccttgtagatgctgcatattagccctttgtcagatggatagattacaaaaattttctcccattctgtaggttgcctgttcacttcgatgatagtttctcttcctgtgcagaagctctttagcttacttagatcccatttgttaatttcgcttttgttaccattgcttttggtgttttagtcatgaagtctttacccatgcctatgttctaaatggtattgcctaagttttcttctagggtttttatggttttaggtcttacatttaaatctttaatccatcttgagttaaatttgtataagtggtaaggaaggggtccagtttcagttttctgcatatagctagccagttttcccaacaccatttattaaatagggaatcctttccccatttcttgtttttgtcaggtttgtcaaagatcagagggttgtagatgtgtggtgttatttctgagccctctgttctgttccattggtctatatatctgttttggtaccagtaccatgctgttttagttactgtagtcatgtaatatagtttgaagtcaggtagcgtgatgcctccagctttgttcttttatgcttaggattgtcttggctatacatgctcttttctggttccacatgaaacttaaaatagttatttctaattctgtgaagaaagtcagtggtaacctgatgggaatagcattgaatctataaattactttggacagtatggccattttcatattgattcttcctatccatgagcatggaatgttttccatttgtttgtgtcctctcttatttccttgagcagtggtttgtagttctccctgaagaggtccttcacatctcccgtaagttgtattcctaggtattttattctctttgtagcagttgtgaatgggagtttgctcatgattgggctatttgtctattattggcatataggaatggttgtgatttttgcacactgatttggtatcctgagactttgctgaagttgcttatcagcttaaggagttttgggactgagacaatgggattttctaaatatacaatcatgtcatctaggggaagtagtcttaacctaactactgaagcctacattctgtctaccttttttgtagaagtaatggaaggttaagggagatgatgcataggccctggaggcctatgattcagaagctctaagtcatgcatgtcaccctttaatgtcaaaggaatcacctgggaatctgttaaaatgcagattctgacctggtaggtcttcggtggagattcaccctcccaggtgacactgacattgctgatccatggaccgtaatttgagtagcaaggctctgtagatcacataataaacccatgtaagagagaatgcagttggaatatagccagataagaaattagttttatcatggttcatagcccttgttgattcttaattcttccaaagaagaatcagatcactgactctgaaggatttagatactctacaggctttcataatagtccctagaatgtgtttttgtcaaatcagagtataaatattatgtattccattaggaaagctgaggtgcattcttcatcagcacttttagtaggggcattcatttatatcaaacataaatgccacctgttttctgaaacactagcataatttataaaaaaaaaactttgttcagttccaaatacacaagtagaaaatcatttgattcagagtttccactaaattgctcattggtgtttgctatatgataaagaatattggcaaataaaatgtgtttaaaaataaaaggtaattttggacattttgctgtactttgttatgatgtatccgaaaaaagattgaattgttttaaacaaaaaactttatcctaaatatgacatctaccagtgtcaattaacatcagtggatgatgtcaccaaagtttccatgattcctcttaaataagaacaaagacactatggttccttttatttttgaatctcattttgtacaatatattccatttcagagtaaataacttacatgtgtaattgtttcattttaccagaaagatatgattggtttcagggtcttagctcaaatagagagcagagaatttattctgttccatagcaatgtgaaagtagttaaaatgaggtgttaagaaattttacaacatatcatttgatgctcaacgataattcatttcccaacaatacattgatcgcacatttgttattgtattgtaaaaatcttttattctacgtgctgtgttttccacgtgttcttggaaaaatgttctgcttcccaaagcacagtgcatgctgttttctgttgaaaaaagcagcatcgtttgcttgatatctatacacatcaggcattgccaaactataggagaatctattcagtaatttagattttattggcagatggtctgttttgaatctgttgtctgtttaatgttacctatttagacccgtggccgtataaatgctaatatactaatgcataatcatgtgtatgccacagaatatttttcttaatgtaaccagttataaacaaaatgtttcttgttgtaaacagatgaaagaaaacacagtactgtacggcaggctcagtagatgagggttagcattctccacacgcccatgtgcttcctgcatttaccaagaaatgattaaggagaatagtggtacatgaaaagccacagttgagtcagggacaatttgtactggtttctttttttttcttggacttctccctatttagcaaacattaacttaaacatgatgttttagtacttcattcattgttctggacatgagctagggaatgaaacatatttatgtgtgcagaacaatggttaaaataattatagttcaaggataacaggcaacaggctttgaattcatagaggcaaagcaaaagaaaatgagaggtaattattgctgtacatccaccacagcggagctacaggctcactgtgtatacctcaattatagcactaatcagacaggacccactaatacatgggcttgtgttattcatttttatttttccagtactggcacatagtttggcactcagtaaatgtttcctgcatgcgtgaaagacgcagtttcaaagcaccagggttatttatacctgcagtggtgacgagagtaaacttcagcatagaaagaaaaaaatctcccctaataggataatatcctcttcccccacgctcttttttgtttttgtttttgtttttgtttttgttttttggacacagtctcactgtgtcgcccaggctgcagtgcagtggcgccatctcagctcactgcaagctccgcctcccgggttcaggccattctcctgcctcagcctcccgagtaggtgggactacaggtgcccgccaccatgcccggctaattttttgtatttttagtagagacgggatttcactgttttagccaggatggtctcgatctcctaaccccgtgatccgcccacctcggcctcccaatgtgctgggattacaggcgtgagacaccgcgcccggcccctcccccaagctcatttttataggcaacatatgacaagggccatggccttttctgatgttttgctgaagcatcaactctaactttgccttggttctaggtgattccctttctgttgttcaagtgtcacgatgtgggccaagcagctgattttaattattaatctattaacttgaagtattaaattattactcacagttttactcttcattagattgcatgcatatttggtttgccttttgccatttaataaacattccaagcacagctttttctccaggaagcttaaaacttcttttcaaacaggattaactgtaaagtattctttgaaagaacgaaaattgtgtctatatgcatgtgacttcttattttgcacaagatatggcatagacagtttcatgcataataagaagtaaagcaaaacaattcatattcatattcctgttcaggcagcaataacttttacaagaagtattgaatataagcattgaagacaaggaaaggatcaacaaattgtgagaaattattacccattggcagtcaaaatttatgaaaaattactgaaattcttggtgctcagatttgtttcataaagaaaacctctgaagtatctagaaatctataaagctccacatttaatttgatggtatttctgtatcaatatatttttatcttgtatcattcttagaatatagtatcaaggcctgcattgattctacatggtatcacaaaaagtaccacaaggaaagatcttctcttgaccaaagtattttaaagtcttgggagtctgcaacacatcctggctggagcctccttttttttttttttttttttttttttgagatggagtcttgttctgtcacccaggctgtagtacagtggcatgatctcggctcactgcaacctccacctcccgggttcaagtgattctcctgtctcagcttcccaagtagataggattaaaggcacctgccaccatgccaggccaatttttgtatttttagtagacatgggatttcaccatgttggccaggctggtcttagactcctgacctcaagtgatccacctgcctcagcctctcaaaatgctgggattacaggcatgagccaccacacccagccggctaatttatttttgtgtttttagtagagatggcatttcaccttgttgcccaggctggtctcaaactcctgacctcaagtgatccacccgcctcaacctcccaaagtgcagggattacaggcgtgaaccaccatgactggccccttcatcatgtttttttaatgactttcaactcatttccctaatacagaaattaaacaatgaggctatgactgtctcatagcacagttttttatttctgcatgaataaagggtcaaatttagaacaaagtaaaaatagatcaagatagacctctttaaaagccatcatttattttactgattcttagtttgttttagttttataggttcatttaagtatctgaaggctatgacctcttatatcagaaaaattcccatacatgtacccatacctctacttaaaatttcatgtgaaatgaaatgatagccacttccatggagtccaggtagaggacccctggtttattgagaaactgtcaggtgttttacattgttagggattcctgggtagtcctctaagagtttataggcccactgggtgaaaacccccgggaagcagttcagtaatcgtacccttgcctgtcatatttggctcaaggacaaagttaccatagtcatgtaattcttgaggaattaattcacctacctgagtcttggctttctcattgtaactctaactccgatggttactgtgagcattagatcattcagtcatgagaaggagctgtacagatgacaacatggtgcaattatatctccctttcagtccttgggaggggtgacattagtaaagagatgaaggtaagcctccagcagccgagcatgcactgttctcgccacccttcccaaaaagcttcctgttatttacaggatttcagctatgcagcatgttattttgaattaagggttatggattcttcatttcagttgtctgggtattactttaaatcctctcatttggaataaacatgtcaagattactttaaaatatattgttcatcaaatcaagaacagaaatagtctttgtaaaaataataatgcttctatacttattacaatattatgattggttacttcaataaaaaacatctcaaatggagccgtgccgtttaaattggattgagtcaaaaggaaaagcccataatggtgcctttgtcaaaatgaatgaaaacaaagggacacaaggcgtggcctgctgccctgatgcgcagagctgcacagtcctggggcaggcacagctgtatggcaggcctggcaacatggtgatttttgtgacatcattagttcctaaatactgtgggttgtaagtgtctgtggccatgcctggacaccaagtcagcatcatgaggctccccttccgtttgacttctgcaagtcctatatttgtaggccccaagggtccatggctccaagcatttgtcctagagtgttacacatgattcctgcaaggggggggggcagggaaagtacaataaagtagcaatataatatgtcatgttgacatttcttagatgcctactgcattccaagccccgtcctatgaggttgctacatgttatcccacttcatcttaatccgtaatcccataatcacacgagtctgttatcttcatgtgggggcggggtatgtttctcatctgcagaaggttgtcaccttcaagggacaggtattacaaagatgttgagttaattttcagttatttggggttcttaatcgtatctggggcttttggatctcatattttagttttaaaaccccatcagtttcatcagtttatagttaataacataggtttacaagtgtaataactcaaaaatttatttcatttagttgtataaaatatgattggcttattccccatgcaaccatttagttaaaaaaattgagacattacatttcattttaaagctcgtctttgttactttctttgaacctgaaaatccttaatctgttactctaaaaaaatcttcactgagatatgactggcctcaccacactggtctgtgtgaatttgctggcttttaaggacattatagtcacagccaagatagacaagctatgaagtatgtgtgctttcacatttacatatttatataactagaagagtatttgcaaagttttaatatttggatcacttcaaaaactattagaacatattagaaaaactattcacatgttgggggtggctcatgcctgtaatcccagcactttgggaggccgaggcgggcagatcacaagatcgagagatagagaccatcctggctaacacagtgaaaccccgtctctactaaaaatacaaaaaaactagccgggcgtggtggcgggcacctgtagtcccagctactcgggaggctgaggcaggagaatggcatgaacccaggaggcggagcttgcagtgagcaaagatcgccccactgcactccagcccgggcgacaagagtgagactccttctcaaaaaaaagaaaaaagaaaaactattcacgtgcataaaatatactagaaactccatattttctatcaatagactctattttttactgcacctataccaaactctctcttgcccctatggtctgtgtgtgcatctgaatgcttactgttcacatttacttgtttctcttttcaaacactgtggtatcagaacgtctactctttgagtatttgagggttctaattagagaacattcactgagcatctactttgttcaagccattgtgctggttgctgtggagatatggaaataatagaacactgtctcactcaatatatttatcttaaatgtaaaaaagataatgttaacattgtgttggcaaggcttgtgaaagagggaagctgttcctattaaaataacaagaatagctaaaagaaaaacatttacaaattaaaagctaacttttgattaggcttttgttaagaaagttcccttcagttagctattcatattattttactatgttttttgcctaatggtacaagaaaagtaggattcctttatttttaaaatacattttcagatatcttccactctacaaagttaaagttgggaagtttcgttaaaattaatatatgaagtctttgttcaagagtctctaaattgggtttctgggaaattaaatatacgtttgggctcacttttttttttttttttaatcttaccagggtttgtcttgaactcctaacctcaaatgatcctcccattgagcccactttttaaaagagaatgtagccatacaaattctggaaactgtagaaataattaaaatagatataaatgtaccttcatattcactttccagaagtctccaaaacatttgtggggataggttattaagtggttttgtacagcgacgtcattgtttgatggcagaaattagaggccacatcacaaaaacactgtccaagtgtttagcagaaactgatcagggagctgctttcgataacatcataaaagatagtgttttcctttatgaagcagcaggagccatggtaggatgatttagaaggtctttcatggaaataccagggagttagccgcgagatatggaaagacaaagtcagaggccatgaaacctggacacaatgtcacactgtagtcattagaagaggagtaaagtggaggacaataatggaacaggcagagctggggcaatttcagtggtgagggtcggtgtttgagttagaagtgggatctcatctgggatccacaactccccttatttgctaaaagactttaagaaattaacagcctctctgagccttagtttcttcgtctctaaaatgaaagtaatgatatttacctgacagcgtaattaagaagattaaattcaataaagcagacttaccctccagcatattccttttacaaagcatattccacatccgttttctcgattgatcctcaatctcctttggagtaatattactattaggtactggttctagctctgtgttaaagatgagaaaactaaggcacaaagctgttacttgcatgagatcacagacctagtaagtagcagagcaaggacttagagtgaaatcctgattccagtttctgtgcttgagaaatgtctgcttaatgcttcctagtgccaagtcacaccagccagacccagctcccaggattgcacagagaaaaagaactcttaatgactacgttatttgaccctttgataatcagggtaaacaaatatttcaagaggtgtcacctgcaaaagaatcaatgaaagaagtatatcagaaaactttgctcagatgtcagcttttctccaacttgataaacatcccaacattaacttatcaccaccatagagtctcagaataaattgtatacctgtgactttgaagatagggaaaccaaagcccagatggcaaatgtggaaggacttgctttatcaacctggtatagtcccagaggttgcaaattacccccttcataaacagtttccaagaaaagcattctatacttaagaaattaaatataaattaagaaaataaagaacattcacaactaaaagctctgtttaaagaaaaaaaaatggctattgttttcctgagaccccccacatgttgggaagtaacttacagagaggcagtttccttgtggtgtagtctgaactcttgaatagctggctgtgtatggattggggcagtcaccataacgatgggctcatcttcaaacattcatttagattcatcattggaactgtgagcagtgagaaaggaattgtctctcaggactgcgaggggtttgcttacagctcttcttagttgctgcagcctaggctatttgtaactcaaaacagctatggcacatgccacaattttaagaaacaagataactcaccaggaggaatgtgcttaaaatcttataaaaagaataacaaaagcaagataaatctggaaaagtataagtagtaagcagaattggttgtctggagtttagtcactaagcaaacatataataataagatgcttgaagtaaagtttgaaaatgagggaggaatctctttaaaagggtaactaccaggtgaacattggaagcctggcctctattccaaatcataagatccttttgctgtctttcaatctggacccaacactaaattcatgtccagtgcacttgtattcactaatggaatgtcctgtttcttggtggaagtttacacagtgggctttagaaacatgtagtagacacgtttatagattcccactaactaaatagctggcaagtttttcaggcaaagttgaatttgttggaaattcatttctagggtatttgtattaataggcagaattatttggattgaattcatcaataaaaagacattaagtaactggatgaaatttttctttttctttctttttttttttttttttttgagacagagtgtcactctgtctcccaggctagagtgcagtagcacaatctcggctcactgcaacttccacctcccaggtccaagtgattctcctgcctcaggctcctgagtatctgagattaagtaatctgggattacaggcatatgccatcccacacggctaatttttatatttttaatagagatgaggtttcatcatgttggtcagactggtcttgaactcctgacttcaggtgatccacccacctcggcctcccaaagtgctgggattacaggcatgagccaccgtgcccagccatgaatttttttttttaagacccaacagtatgctacctacaagggtcacctcacttttaaggacacacatagactgaaagtgaaaggttggaaaaagattactccatgcaaatagaaaccagaagaaagcagggatagctaaatttatatgagacaaaatagactttaagtcaaaaactataaaaaggacattatataatgataagagcatcaattcctcaagaggatataatagttataaatatgtatgcacccaacattgaagcacctaaatacataaaatattgaagaatctgaagggagggataaattgcaatataataatagtaggagactttcataaacattggacttgaacaaattaataaacattggacttgaacaatactgtagaccaaatgggcctaattgacgtttcatccaacagcaactgtatacacatccttctcaatcatacatggaacattctccaggatagatcaaatgttagggcacaacacaagcctcagcaaattttagaagcctgaaattatatcaagtgtcttttcagaccacagtgttaagaaactagaaatcaataccagaaggaattttggaaaattcacaaatacatggaaataaaaaacatgcttctgaacaacaaatgggtcaatgaagaaattaaatggaagtttaaaaatcttttgaggcaaatggaaatacaacatattaaaatgtgtgggatatggctgggcgcggtggctcacgcctgtaatcccaacactttgggaggccgaggctggtggatcacaaggtcaagagatcaagaccatcctggctaacacggggaaacctcgtctctactaaaaatacaaaaaattagccgggcgtggtgacgggcgccagtagtcccagctactcgggagactgaggcaggagaatggagtgaacccgggaggtggagcttgcagtgagccaagattgtgccactgcactccagcctgggcgacagagcaagactctgtctcnnnnnnnnnnnnnnnnnnnnnnnnnnnnnnnnnnnnnnnnnnnnnnnnnnnnnnnnnnnnnnnnnnnnnnnnnnnnnnnnnnnnnnnnnnnnnnnnnnnnnaaaaaaaaaaaaaaaaaaaaaaaagtatgggatacagcaaaagcagttctaaaagcaaagtttaaacacctacatcaaaaaggaagagagatcccaacctaacattatacctcacggaactgcggggagggagaaactaagtccaaagttagcagaaggaaagaaataagatggaaacagaaataaacgaaggagactagaaaaacagtacgaagatcaaccaaactaagagttgttttctttgaaaagagaaaatcaacaaatctttagctaagccaagaagacacaaaatcagataccacagaaatacacaggaacatttgagactattaggaataaatatatgccaacaaattggataacctagaagaaatgtataaatttctagatgtatacaacttaccaacactgaagaaatagaaaatctaatagaccaatgggtgaggagatgaagtcagtaagttttccatcaaagaaaaccctaggacctgatggcttcatggctgaactctaccaaatatttaaataactaataccagtccttctcagattctttcaaaaaagtaaatgaggaggaaatacttccagactcttttttgcaaggccagcattatcctcataccaaaggcaggcaaggacattacaaaaaataataataataaattacaggccaatatcctttatgaacatagatgtaaaaatccccaatataatactagcaaacccaattcaacaaattcaacaacacattaaaggatcatccaccatgatcaagtaggatttatccctgggatgcaaggatgattcagtgtacccaaatcgacaaatgtgatacatcattaacagaatgaaagccaaaaaccatataattatttcattagatgcaaagaaagtgtttgacaaaattgacaagtttattaaaatagtttgttgctgagttatttttcagttctaaatatcaataataataatagctaactcctactgtgcactaacttcataccaggtgtgttttaagcacctcacaggtattaactcagtgctactcagatagagttctgttaattttattttcttttttaattagccaaatctcttattgatttggttttgtttcagctattttttctatccattgactctaatataagccataaatttttatgcaattttaatctgattatcatttcctcttaagttttttgaggattggtttcattttgctagaagaaccttgtgagaccttcttcctctatccccgttcagagacttttgttagtttcagtcaaccaaaatgtgataatgtctaagtaaactggtcattttcaagtttctataatagtaagcctcttgatgattagtgttaacaaataggaagaaaacatcccagattcttaatagaagaaatcagatttgtcatacagagatggaaactcaagacagaccaccacattatttaaatgttagtttgtgataaagtgggctacatccaaaaaaattcctcaggaaaacaattaggcatgccagaaaactgggagaaaatattctcaacacatatatctgtctaaggacttatatccagatcacatagcaaggccctgcaaattaataaaagtcaagcaaattgcaaattaaagataggcaaaagacttgtacatgctgttctcagaagaaggtacatgaacaaccagtaagcacgtgaaaagatgcgcagcatcttcaagcatcacagaaatgcagtcgcggtaccattcacacccactaggatagctaaaacagaaaagactgacgatcagtgttgatgaggatgtggtgcagctcagactctcatgctgttaatgggagtgcaaagggatacaatctcttgggaaaactgtttcttgtgaagttaactatagaactactctatgacccagcacttccttgtatttacccggaaaaataagttctcaaaatttgaacaaaaacattcatagcattcttattaatagcatttttattatacgaaacctccaagctggaaataacccaaatgtccgctgaaaagaaaatggaggaattgaggtatagtcataaggaactactgccgaatagctcgataacatgagtgaatctcataggcgcaagggagtgtgttctgcgtgattccatttatgtgaactcctagtacaagcaaaattaactacagaattagaagtcagaatagtgtctacctcttggggtggaggtgggatatcttgaggggaggcgtttgtagtgtatccagttgtcaaataatcatcctgctggaaaatttccattttgtttgctcagtttttaattgtttccattttaaaatgttaactttgttcttgggaccaaaaacatagagctatttgtgttatgacatcttttgatttatagtctaaatcaggagtccccaacccccaggccggataccagtactggtgagtggcctgttaggaaccaggccacacagcaggaagtgagtggcgagcaggagcattgctgcctgagctccgcctcctgtcagatcagtaaggcattagattcccataggagcatgaaccctactgtgaactgtgtatacaagggatctaggttgtgcgttctttatgtggatctaacacctgatgacctgaggtggaacaatttcatttcgaaacgaccccgtccgtggaaaaattggcctccacaaaaccagtccctggtgcccaaaaggttggggaccaccgacctaaattataaaatttagcgagatgcatctttactacttaaaatgtgagctgcatttctagtcagtgccttgtctccttctgtcaaagtttgagtcaccggattttatattgtttcattcaaaatgtgttgggataccctttttatggtgtgaatacagattgagagaaatacatttttatatcatttttgttatgaaagagtgaaactgaatgtaaaccaagagtgaatggagtgaatctaaaccaagattattctagagacaacagtgtcgctataaattaattaactagaactctttcttttcctgaaggtgtacaagggagaagaagccacattccaaatctcaggcctccagaccaacacagactacaggttccgtgtatgtgcatgtcgtcgctgtttagacacctctcaggagctaagtggagccttcagcccctctgcggcttttgtattacaacgaagtgaggtcatgcttacaggggacatggggagcttagatgatcccaaaatgaagagcatgatgcctactgatgaacagtttgcagccatcattgtgcttggctttgcaactttgtccattttatttgcctttatattacagtacttcttaatgaagtaaacccaacaaaactagaggtatgaattaatgctacacattttaatacacacatttattcagatactcccctttttaaagcccttttgttctttgatttatatactctgttttacagatttagctagaaaaaaattgtcagtgttttggtgcacctttttgaaatgcaaaactaggaagaggttaaactggatttttttttaaaaaaaaaaaaaagaaagaaaaaagaaaaagaaaaaaaaaaaaagaagaaaagcataccagataccaaaagctagctttcttatgttttcctttaaattttcagatttaccttcattctgttttcactgatgtcttttgcaagcctttgattttgttttttttttgttacagtttagtaatttatattcaccagtcacttcttatgtctcgatcatctatatctgtaaacatgaatcaccgtgtgtgtacttacagggctaggatttcagtgttgtcagagtattaccacacagcaacagcaacatacaaaagatatgttcactcagataagactgccctaaacaaccattttgtcactcagttatttaactgtgtttagctcatttaaatcaaaatgtgtactttaatctaaaatgttttaataatctgtatttcttataattttaacactatgagctgcctgtataagaaatcaagtaagcagaatgcacctataaattatggagcattgtagattttaccacatcaattcatagcagtaactttaagagggcattgtgcaatagttagttgttttcttgttcagctattttaaaggctgctttaacttgtttgtttgtctttgtatataactacttctaatcactagagttattatattctgttatgtttgaccagaattatatgacaagaactggcgacagtttagtgcctctgcccattgtccatgatttacactaattgtgagcagtcttcttatgtgtcagctcattatttttgaagcatttgcctttaggctgttctttgaggtatcaatgaagtgattgaatttcaataccttaattcagtgcacataatactaatgtaaccgcagatgaaaattgataaaacccaaaagagagtcatctaaatttgtagttcctatttctgtggggttgcctggccatggttggagagggaatggtgtttgatggtaaacacagggtgtttgggaatcaaagagcctagattctttccctggatctgtcactaacttgctgcgtgacctgaacacgtcactttacctctctgtgcctcagttttcccatgcatgaaaaataaaataaaaataaaatggggattcttatgtttgtaagtgctttgagatatttgaccaacaggtgctattggagtgcaaagtgttactcttatgtgtttattttgagtcatgagataatcaattttaacccaaagtcattggattatttatatgaagtccataatgttcgagtacctcagggacatttaagagttggaggtgcaaatatattccaaaagggtgcaacagacacagtgtatccccctgcttctgtttttgtatatttttgctacttggtttttcttgatcatagctattttgtgcttggtctttgttgtctaagatgcagtatcctgtactagcttataatattcccataccaaagtcatggggaaaccaacattattttgtttttggtttatttatactatattctgcatacagtactttaaatgccaattacagtgcaatctttatttattgtaaaaaatttttaaatgtacttatgtactaattttcccttgtagcatgttatatttttgtgttttatacttttgtaattttaggtcagtcttgttccttggcaacatctgtagtattattaatcttctgacattttcttgtgtttttaaaaagataagagcatctagtgcattaaatgccaaaaaaaaaaaaaagaaatccattatcagtgattgaaacgtttacatgtaccccaaaaccataatcatctcttggaagaaaatgctgagatcaatgaattattctgtgtgcctatattgatgtagtgagtactagagagttctgtgttttttattattgactataataagtagtttaattagctttgcaaactgatggcatcgaggtaaatatatttctgccaaagttctggccttccaaaactcacccccctgtttaaacatgtgctgtgacccactgtgacacagcatgtgcattttctaaaaaattccacgcaggtgtttcggggagaggtattttttaagcaatgcaaattcaactgagtacaaagccccctctcggggggttggggaagtctcttttttgaaacacttcagaactgctgctataaagaaattctctgaattggttgaattttttttaagtaaatagtactttaggccaaaatctatatgaatatttgatcttcttgagattttcatactatcatttaaccaccaggaagctgaagtgtgtgaaatacaaagctgacagcactttattttattgctctccattatttggtattcattatattccttcagtcagaaaattattactctctatggcactgttttctatcacaaatatgtatatgtgatattgatatataactatatatattgccattacacacgaacaataaaataaagtgttctattaacctgatctctttgcccttttgctatgtgaggagtgaatgagtggccttctgatgctctgactcttctctgtatgtcaaactcatccctggcacaagaaattccagtcatgtgaagcaaactgccctttgtcctcaaagaaattgttgaaaaagaacactttttaaagagactttctgcatattctctgccttgttcttatcaactttaaatgttggcattttctaaccttgttttgttggctacagtaattcagtattcatgtcaaaaattgagaagtgccctaattgaatgtgtttgaatgttatccttgcacaattctttaaattgaaagataaaatgttttacctcactgttggacatacattccaagcttttcaactctaggagaaaaagaaaatcatgttttcctgtattgtaaattttagactatttcatatacattgtattaaaactgccatatcaattttaatgtatagattttgcaaatactatgctatatgtaatacctaactgtatctgtagtgtatatgtaatatatttatgcccaataaatgttttaattctttctgacttaa

SEQ ID NO: 9 - DNA, 300 bp, Artificial Sequence
  target site sequence
catgtcgttatgcaaccaccaccactagcaaattctagaacatcggcattgtgtaaccaccaccactagcaaattctagaacatcggcattgtgtaaccaccaccactagcaaattctagaacatcggcattgtgtaaccaccaccactagcaaattctagaacatcggcattgtgtaaccaccaccactagcaaattctagaacatcggcattgtgtaaccaccaccactagcaaattctagaacatcggcattgtgtaaccaccaccactagcaaattctagaacatttttgtccctt

SEQ ID NO: 10 - DNA, 82 bp, Artificial sequence
  Target sitesequence
agcaaattctagaacatcggcattgtgtaaccaccaccactagcaaattctagaacatcggcattgtgtaaccaccaccact

SEQ ID NO: 11 - DNA, 20 bp, Artificial sequence
  Oligonucleotide motif
gaatttgctagtggtggtgg

SEQ ID NO: 12 - DNA, 14 bp, Artificial sequence
  oligonucleotide motif
gctagtggtggtgg

SEQ ID NO: 13 - DNA, 18 bp, Artificial sequence
  oligonucleotide motif
aatttgctagtggtggtg

SEQ ID NO: 14 - DNA, 16 bp, Artificial sequence
  oligonucleotide motif
atttgctagtggtggt

SEQ ID NO: 15 - DNA, 20 bp, Artificial sequence
  oligonucleotide motif
ttatttctacagtttccaga

SEQ ID NO: 16 - DNA, 18 bp, Artificial sequence
  oligonucleotide motif
atttctacagtttccaga

SEQ ID NO: 17 - DNA, 14 bp, Artificial sequence
  oligonucleotide motif
ctacagtttccaga

SEQ ID NO: 18 - DNA, 16 bp, Artificial sequence
  oligonucleotide motif
atttctacagtttcca

SEQ ID NO: 19 - DNA, 30 bp, artificial sequence
  Target site sequence
aaccaccaccactagcaaattctagaacat

SEQ ID NO: 20 - DNA, 20 bp, artificial sequence
  target site sequence
ccaccaccactagcaaattc
